(19) United States
(12) Patent Application Publication
(10) Pub. No.: US 2018/0237800 A1
(43) Pub. Date: Aug. 23, 2018

(54) COMPOSITIONS AND METHODS FOR TARGET NUCLEIC ACID MODIFICATION

(71) Applicant: The Regents of the University of California, Oakland, CA (US)

(72) Inventors: Niren Murthy, Berkeley, CA (US); Kunwoo Lee, Albany, CA (US); Irina M. Conboy, El Sobrante, CA (US); Michael J. Conboy, El Sobrante, CA (US)

(21) Appl. No.: 15/754,488

(22) PCT Filed: Sep. 20, 2016
(86) PCT No.: PCT/US16/52690

§ 371 Date: Feb. 22, 2018

Related U.S. Application Data
(60) Provisional application No. 62/245,808, filed on Oct. 23, 2015.
(60) Provisional application No. 62/221,505, filed on Sep. 21, 2015.

(51) Int. Cl. C12N 15/90; C12N 9/22; C12N 11/08; C12N 11/14; C12N 15/10

(52) U.S. Cl. CPC C12N 15/902; C12N 9/22; C12N 11/08; C12N 2320/32; C12N 15/102; C12N 2310/20; C12N 11/14

(57) ABSTRACT

The present disclosure provides a complex comprising a nanoparticle; a Type II or a Type V CRISPR system comprising a site-directed DNA-modifying polypeptide and a guide RNA; and a polycation-based endosomal escape polymer. The present disclosure provides methods of making and using a complex of the present disclosure.

### CROSS-REFERENCE

[0001] This application claims the benefit of U.S. Provisional Patent Application No. 62/221,505, filed Sep. 21, 2015, and U.S. Provisional Patent Application No. 62/245,808, filed Oct. 23, 2015, which applications are incorporated herein by reference in their entirety.

### STATEMENT REGARDING FEDERALLY SPONSORED RESEARCH

[0002] This invention was made with government support under Grant Nos. AI119115, AI117064, and AG048316, awarded by the National Institutes of Health. The government has certain rights in the invention.

### INCORPORATION BY REFERENCE OF SEQUENCE LISTING PROVIDED AS A TEXT FILE

[0003] A Sequence Listing is provided herewith as a text file, “BERK-304WO_SeqList_ST25.txt” created on Sep. 20, 2016 and having a size of 7,716 KB. The contents of the text file are incorporated by reference herein in their entirety.

### INTRODUCTION

[0004] RNA-mediated adaptive immune systems in bacteria and archaea rely on Clustered Regularly Interspaced Short Palindromic Repeat (CRISPR) genomic loci and CRISPR-associated (Cas) proteins that function together to provide protection from invading viruses and plasmids. In Type II CRISPR-Cas systems, the Cas9 protein functions as an RNA-guided endonuclease that uses a dual-guide RNA consisting of crRNA and trans-activating crRNA (tracrRNA) for target recognition and cleavage by a mechanism involving two nuclease active sites that together generate double-stranded DNA breaks (DSBs).

[0005] RNA-programmed Cas9 has proven to be a versatile tool for genome engineering in multiple cell types and organisms. Guided by a dual-RNA complex or a chimeric single-guide RNA, Cas9 (or variants of Cas9 such as nickase variants) can generate site-specific DSBs or single-stranded breaks (SSBs) within target nucleic acids. Target nucleic acids can include double-stranded DNA (dsDNA) and single-stranded DNA (ssDNA) as well as RNA. When cleavage of a target nucleic acid occurs within a cell (e.g., a eukaryotic cell), the break in the target nucleic acid can be repaired by non-homologous end joining (NHEJ) or homology directed repair (HDR).

[0006] Thus, the Cas9 system provides a facile means of modifying genomic information. In addition, catalytically inactive Cas9 alone or fused to transcriptional activator or repressor domains can be used to alter transcription levels at sites within target nucleic acids by binding to the target site without cleavage.

### SUMMARY

[0007] The present disclosure provides a complex comprising a nanoparticle; a Type II or a Type V CRISPR system comprising a site-directed DNA-modifying polypeptide and a guide RNA; and a polycation-based endosomal escape polymer. The present disclosure provides methods of making and using a complex of the present disclosure.

[0008] The present disclosure provides a complex comprising a nanoparticle; a Type II CRISPR system comprising a Cas9 polypeptide and a guide RNA; and a polycation-based endosomal escape polymer. The present disclosure provides methods of making and using a complex of the present disclosure.

[0009] The present disclosure provides a complex comprising a nanoparticle; a Type V CRISPR system comprising a Cpf1 polypeptide and a guide RNA; and a polycation-based endosomal escape polymer. The present disclosure provides methods of making and using a complex of the present disclosure.

[0010] The present disclosure provides a complex (e.g., an encapsulated complex) comprising: a) nanoparticle-nucleic acid conjugate; b) a Type II CRISPR system comprising: i) a Cas9 polypeptide; and ii) a guide RNA; and c) an endosomal disruptive polymer. The nanoparticle-nucleic acid conjugate and the Type II CRISPR system (comprising: i) a Cas9 polypeptide; and ii) a guide RNA) form a complex, and are encapsulated in the endosomal disruptive polymer. In some cases, the nanoparticle is a colloidal metal nanoparticle. In some cases, the colloidal metal nanoparticle is a gold nanoparticle. In some cases, the complex further comprises a donor polynucleotide (e.g., a DNA donor template). In some cases, the encapsulated complex further comprises a silicate; for example, in some cases, the endosomal disruptive polymer and the silicate encapsulate the Type II CRISPR system. In some cases, the endosomal disruptive polymer is a cationic polymer selected from the group consisting of polyethylene imine, poly(arginine), poly(lysine), poly(histidine), poly-[2-{(2-aminoethyl)amino}-ethyl-aspartamide] (pAsp(DET)), a block co-polymer of poly(ethylene glycol) (PEG) and poly(arginine), a block co-polymer of PEG and poly(lysine), and a block co-polymer of PEG and poly{N—[N-(2-aminoethyl)-2-aminoethyl]aspartamide} (PEG-pAsp(DET)). In some cases, the endosomal disruptive polymer is poly{N—[N-(2-aminoethyl)-2-aminoethyl]aspartamide} (PAsp(DET). In some cases, the nanoparticle has a diameter in the range of 10 nm to 1000 nm. In some cases, the nanoparticle has a diameter in the range of 10 nm to 50 nm. In some cases, the Cas9 polypeptide comprises an amino acid sequence having at least 25% (e.g., at least 30%, at least 40%, at least 50%, at least 60%, at least 70%, at least 75%, at least 80%, at least 85%, at least 90%, at least 95%, or more than 95%) amino acid sequence identity to an amino acid sequence set forth in FIG. 6A-6J (SEQ ID NOs:5-14). In some cases, the Cas9 polypeptide is enzymatically active. In some cases, the Cas9 polypeptide exhibits reduced enzymatic activity relative to a wild-type Cas9 polypeptide, and wherein the Cas9 polypeptide retains target nucleic acid binding activity. In some cases, the Cas9 polypeptide comprises a nuclear localization signal. In some cases, the guide RNA is a single-molecule guide RNA. In some cases, the guide RNA is a dual-molecule guide RNA.

[0011] The present disclosure provides a complex (e.g., an encapsulated complex) comprising: a) a colloidal metal nanoparticle-nucleic acid conjugate; b) a Type II CRISPR system comprising: i) a Cas9 polypeptide; and ii) a guide RNA; and c) an endosomal disruptive polymer. The colloidal metal nanoparticle-nucleic acid conjugate and the Type II CRISPR system (comprising: i) a Cas9 polypeptide; and ii) a guide RNA) form a complex, and are encapsulated in the endosomal disruptive polymer. In some cases, the colloidal metal nanoparticle is a gold nanoparticle. In some cases, the complex further comprises a donor polynucleotide (e.g., a DNA donor template). In some cases, the encapsulated complex further comprises a silicate; for example, in some cases, the endosomal disruptive polymer and the silicate encapsulate the Type II CRISPR system. In some cases, the endosomal disruptive polymer is a cationic polymer selected from the group consisting of polyethylene imine, poly(arginine), poly(lysine), poly(histidine), poly-[2-{(2-aminoethyl)amino}-ethyl-aspartamide] (pAsp(DET)), a block co-polymer of poly(ethylene glycol) (PEG) and poly(arginine), a block co-polymer of PEG and poly(lysine), and a block co-polymer of PEG and poly{N—[N-(2-aminoethyl)-2-aminoethyl]aspartamide} (PEG-pAsp(DET)). In some cases, the endosomal disruptive polymer is poly{N—[N-(2-aminoethyl)-2-aminoethyl]aspartamide} (PAsp(DET). In some cases, the colloidal metal nanoparticle has a diameter in the range of 10 nm to 1000 nm. In some cases, the colloidal metal nanoparticle has a diameter in the range of 10 nm to 50 nm. In some cases, the Cas9 polypeptide comprises an amino acid sequence having at least 25% (e.g., at least 30%, at least 40%, at least 50%, at least 60%, at least 70%, at least 75%, at least 80%, at least 85%, at least 90%, at least 95%, or more than 95%) amino acid sequence identity to an amino acid sequence set forth in FIG. 6A-6J (SEQ ID NOs:5-14). In some cases, the Cas9 polypeptide is enzymatically active. In some cases, the Cas9 polypeptide exhibits reduced enzymatic activity relative to a wild-type Cas9 polypeptide, and wherein the Cas9 polypeptide retains target nucleic acid binding activity. In some cases, the Cas9 polypeptide comprises a nuclear localization signal. In some cases, the guide RNA is a single-molecule guide RNA. In some cases, the guide RNA is a dual-molecule guide RNA.

[0012] The present disclosure provides a method of producing the complex of any of claims 1 to 14, the method comprising: contacting a Type II CRISPR system comprising: a ribonucleoprotein (RNP) comprising a Cas9 polypeptide and a guide RNA (gRNA), with a colloidal metal nanoparticle (NP)-nucleic acid conjugate, under conditions sufficient to generate a NP-nucleic acid-RNP complex; and ii) encapsulating the NP-nucleic acid-RNP complex within one or more layers of an endosomal disruptive polymer. In some cases, the Type II CRISPR system comprises a donor polynucleotide.

[0013] The present disclosure provides a method of binding a target nucleic acid, comprising:

[0014] contacting a cell comprising a target nucleic acid with a complex (e.g., an encapsulated complex) as described above or elsewhere herein, wherein the complex enters the cell, and wherein the guide RNA and Cas9 polypeptide are released from the complex in an endosome in the cell. In some cases, the cell is in vitro. In some cases, the cell is in vivo. In some cases, the Cas9 fusion polypeptide modulates transcription from the target nucleic acid. In some cases, the Cas9 fusion polypeptide modifies the target nucleic acid. In some cases, the Cas9 fusion polypeptide cleaves the target nucleic acid. In some cases, the complex (e.g., the encapsulated complex) comprises a donor template polynucleotide, and the method comprises contacting the target nucleic acid with the donor template polynucleotide.

[0015] The present disclosure provides a method of genetically modifying a target cell, comprising: contacting a target cell with a complex (e.g., an encapsulated complex) as described above or elsewhere herein. In some cases, the target cell is an in vivo target cell. In some cases, the target cell is a plant cell. In some cases, the target cell is an animal cell. In some cases, the target cell is a mammalian cell. In some cases, the target cell is a myoblast, a myofiber, a neuron, a chondrocyte, a lymphocyte, an epithelial cell, an adipocyte, or a keratinocyte. In some cases, the target cell is pluripotent cell.

### BRIEF DESCRIPTION OF THE DRAWINGS

[0016] FIGS. 1A and 1B are a collection of images and schematic diagrams showing the synthesis of Gold-Cas9 and intracellular release of Cas9 ribonucleoproteins (RNPs), according to embodiments of the present disclosure.

[0017] FIGS. 2A and 2B are a collection of images showing loading of active Cas9/guide RNA (gRNA) RNP and release of the same from gold nanoparticles (GNPs), according to embodiments of the present disclosure.

[0018] FIGS. 3A-3F are a collection of images and figures showing delivery of and gene editing by Cas9 using GNPs in cultured cells, according to embodiments of the present disclosure. FIG. 3F: ACCACCGTGACGTACGGC (SEQ ID NO: 1137); and ACCACCCTGACCCATGGC (SEQ ID NO: 1138).

[0019] FIGS. 4A-4F are a collection of images and figures showing delivery of and gene editing by Cas9 using GNPs in various cell types, according to embodiments of the present disclosure.

[0020] FIGS. 5A-5D are a collection of images showing in vivo delivery of Cas9, according to embodiments of the present disclosure.

[0021] FIGS. 6A-6J are a collection of figures showing amino acid sequences of Streptococcus pyogenes Cas9, and variants thereof.

[0022] FIG. 7 depicts a multiple sequence alignment of motifs 1-4 of Cas9 proteins from various diverse species. S. pyogenes Motif 1: IGLDIGTNSVGWAVI (SEQ ID NO:1); Motif 2: IVIEMARE (SEQ ID NO:2); Motif 3: DVDHIVPQSFLKDDSIDNKVLTRSDKN (SEQ ID NO:3); and Motif 4: HHAHDAYL (SEQ ID NO:4).

[0023] FIGS. 8A-8C list examples of suitable fusion partners (or fragments thereof) for a subject Cas9 polypeptide (e.g., wild type Cas9, variant Cas9). Examples include, but are not limited to those listed.

[0024] FIG. 9 provides an amino acid sequence of Cpf1 from Francisella tularensis subsp. novicida U112 (SEQ ID NO: 1123).

[0025] FIGS. 10A-10B depict use of CRISPR-gold particles to correct the human Duchenne Muscular Dystrophy (DMD) mutation in dystrophin gene, using the mouse model of human dystrophin mutation (MDX mice) in vivo: dystrophin protein (lacking in DMD/MDX) becomes expressed in most/all muscle fibers (myofibers) at the site of CRISPR-gold particles injection after a single application. Negative control particles, which had no Cas9 did nor restore the expression of dystrophin.

[0026] FIGS. 11A-11C depict use of CRISPR-gold to improve symptoms related to Duchenne Muscular Dystrophy (DMD) in the mouse model of the human disease.

[0027] FIG. 12 demonstrates the effect of gold nanoparticle size on HDR efficiency.

[0028] FIG. 13 depicts synthesis of CRIPSR-Gold using as an example CXCR4 donor DNA (SEQ ID NO: 1114) and Gold nanoparticles conjugated with 5′ thiol modified DNA (SEQ ID NO: 1112)

[0029] FIG. 14 depicts the effect of the amount of donor DNA in CRISPR-Gold on the HDR frequency of CRISPR-Gold treatment.

[0030] FIG. 15 depicts the sequence of genomic DNA targeted in the mdx mouse and the sequence of the donor DNA. Targeted DNA: AGTTCTTTGAAAGAGCAATAAAATGGCTTC (SEQ ID NO: 1099); donor DNA: AGTTCTTTAAAGGAGCAGCAGAATGGCTTC (SEQ ID NO: 1100).

[0031] FIG. 16 depicts off-target editing frequency.

### DEFINITIONS

[0032] The terms “polynucleotide” and “nucleic acid,” used interchangeably herein, refer to a polymeric form of nucleotides of any length, either ribonucleotides or deoxyribonucleotides. Thus, this term includes, but is not limited to, single-, double-, or multi-stranded DNA or RNA, genomic DNA, cDNA, DNA-RNA hybrids, or a polymer comprising purine and pyrimidine bases or other natural, chemically or biochemically modified, non-natural, or derivatized nucleotide bases.

[0033] By “hybridizable” or “complementary” or “substantially complementary” it is meant that a nucleic acid (e.g. RNA, DNA) comprises a sequence of nucleotides that enables it to non-covalently bind, i.e. form Watson-Crick base pairs and/or G/U base pairs, “anneal”, or “hybridize,” to another nucleic acid in a sequence-specific, antiparallel, manner (i.e., a nucleic acid specifically binds to a complementary nucleic acid) under the appropriate in vitro and/or in vivo conditions of temperature and solution ionic strength. Standard Watson-Crick base-pairing includes: adenine (A) pairing with thymidine (T), adenine (A) pairing with uracil (U), and guanine (G) pairing with cytosine (C) [DNA, RNA]. In addition, for hybridization between two RNA molecules (e.g., dsRNA), and for hybridization of a DNA molecule with an RNA molecule: guanine (G) can also base pair with uracil (U). For example, G/U base-pairing is partially responsible for the degeneracy (i.e., redundancy) of the genetic code in the context of tRNA anti-codon base-pairing with codons in mRNA. Thus, in the context of this disclosure, a guanine (G) (e.g., of a protein-binding segment (dsRNA duplex) of a guide nucleic acid molecule; of a target nucleic acid base pairing with a guide nucleic acid, etc.) is considered complementary to both a uracil (U) and to an adenine (A). For example, when a G/U base-pair can be made at a given nucleotide position of a protein-binding segment (e.g., dsRNA duplex) of a subject guide nucleic acid molecule, the position is not considered to be non-complementary, but is instead considered to be complementary.

[0034] Hybridization and washing conditions are well known and exemplified in Sambrook, J., Fritsch, E. F. and Maniatis, T. Molecular Cloning: A Laboratory Manual, Second Edition, Cold Spring Harbor Laboratory Press, Cold Spring Harbor (1989), particularly Chapter 11 and Table 11.1 therein; and Sambrook, J. and Russell, W., Molecular Cloning: A Laboratory Manual, Third Edition, Cold Spring Harbor Laboratory Press, Cold Spring Harbor (2001). The conditions of temperature and ionic strength determine the “stringency” of the hybridization.

[0035] Hybridization requires that the two nucleic acids contain complementary sequences, although mismatches between bases are possible. The conditions appropriate for hybridization between two nucleic acids depend on the length of the nucleic acids and the degree of complementarity, variables well known in the art. The greater the degree of complementarity between two nucleotide sequences, the greater the value of the melting temperature (Tm) for hybrids of nucleic acids having those sequences. For hybridizations between nucleic acids with short stretches of complementarity (e.g. complementarity over 35 or less, 30 or less, 25 or less, 22 or less, 20 or less, or 18 or less nucleotides) the position of mismatches can become important (see Sambrook et al., supra, 11.7-11.8). Typically, the length for a hybridizable nucleic acid is 8 nucleotides or more (e.g., 10 nucleotides or more, 12 nucleotides or more, 15 nucleotides or more, 20 nucleotides or more, 22 nucleotides or more, 25 nucleotides or more, or 30 nucleotides or more). The temperature and wash solution salt concentration may be adjusted as necessary according to factors such as length of the region of complementation and the degree of complementation.

[0036] It is understood that the sequence of a polynucleotide need not be 100% complementary to that of its target nucleic acid to be specifically hybridizable or hybridizable. Moreover, a polynucleotide may hybridize over one or more segments such that intervening or adjacent segments are not involved in the hybridization event (e.g., a loop structure or hairpin structure). A polynucleotide can comprise 60% or more, 65% or more, 70% or more, 75% or more, 80% or more, 85% or more, 90% or more, 95% or more, 98% or more, 99% or more, 99.5% or more, or 100% sequence complementarity to a target region within the target nucleic acid sequence to which it will hybridize. For example, an antisense nucleic acid in which 18 of 20 nucleotides of the antisense compound are complementary to a target region, and would therefore specifically hybridize, would represent 90 percent complementarity. In this example, the remaining noncomplementary nucleotides may be clustered or interspersed with complementary nucleotides and need not be contiguous to each other or to complementary nucleotides. Percent complementarity between particular stretches of nucleic acid sequences within nucleic acids can be determined using any convenient method. Exemplary methods include BLAST programs (basic local alignment search tools) and PowerBLAST programs (Altschul et al., J. Mol. Biol., 1990, 215, 403-410; Zhang and Madden, Genome Res., 1997, 7, 649-656) or by using the Gap program (Wisconsin Sequence Analysis Package, Version 8 for Unix, Genetics Computer Group, University Research Park, Madison Wis.), using default settings, which uses the algorithm of Smith and Waterman (Adv. Appl. Math., 1981, 2, 482-489).

[0037] The terms “peptide,” “polypeptide,” and “protein” are used interchangeably herein, and refer to a polymeric form of amino acids of any length, which can include coded and non-coded amino acids, chemically or biochemically modified or derivatized amino acids, and polypeptides having modified peptide backbones.

[0038] “Binding” as used herein (e.g. with reference to an RNA-binding domain of a polypeptide, binding to a target nucleic acid, and the like) refers to a non-covalent interaction between macromolecules (e.g., between a protein and a nucleic acid; between a subject Cas9/guide nucleic acid complex and a target nucleic acid; and the like). While in a state of non-covalent interaction, the macromolecules are said to be “associated” or “interacting” or “binding” (e.g., when a molecule X is said to interact with a molecule Y, it is meant the molecule X binds to molecule Y in a non-covalent manner). Not all components of a binding interaction need be sequence-specific (e.g., contacts with phosphate residues in a DNA backbone), but some portions of a binding interaction may be sequence-specific. Binding interactions are generally characterized by a dissociation constant (K_{d}) of less than 10⁻⁶ M, less than 10⁻⁷ M, less than 10 M, less than 10⁻⁹ M, less than 10⁻¹⁰ M, less than 10⁻¹¹ M, less than 10⁻¹² M, less than 10⁻¹³ M, less than 10⁻¹⁴ M, or less than 10⁻¹⁵ M. “Affinity” refers to the strength of binding, increased binding affinity being correlated with a lower K_{d}.

[0039] By “binding domain” it is meant a protein domain that is able to bind non-covalently to another molecule. A binding domain can bind to, for example, a DNA molecule (a DNA-binding domain), an RNA molecule (an RNA-binding domain) and/or a protein molecule (a protein-binding domain). In the case of a protein having a protein-binding domain, it can in some cases bind to itself (to form homodimers, homotrimers, etc.) and/or it can bind to one or more regions of a different protein or proteins.

[0040] The term “conservative amino acid substitution” refers to the interchangeability in proteins of amino acid residues having similar side chains. For example, a group of amino acids having aliphatic side chains consists of glycine, alanine, valine, leucine, and isoleucine; a group of amino acids having aliphatic-hydroxyl side chains consists of serine and threonine; a group of amino acids having amide containing side chains consisting of asparagine and glutamine; a group of amino acids having aromatic side chains consists of phenylalanine, tyrosine, and tryptophan; a group of amino acids having basic side chains consists of lysine, arginine, and histidine; a group of amino acids having acidic side chains consists of glutamate and aspartate; and a group of amino acids having sulfur containing side chains consists of cysteine and methionine. Exemplary conservative amino acid substitution groups are: valine-leucine-isoleucine, phenylalanine-tyrosine, lysine-arginine, alanine-valine-glycine, and asparagine-glutamine.

[0041] A polynucleotide or polypeptide has a certain percent “sequence identity” to another polynucleotide or polypeptide, meaning that, when aligned, that percentage of bases or amino acids are the same, and in the same relative position, when comparing the two sequences. Sequence identity can be determined in a number of different ways. To determine sequence identity, sequences can be aligned using various methods and computer programs (e.g., BLAST, T-COFFEE, MUSCLE, MAFFT, etc.), available over the world wide web at sites including ncbi.nlm.nili.gov/BLAST, ebi.ac.uk/Tools/msa/tcoffee/, ebi.ac.uk/Tools/msa/muscle/, mafft.cbrc.jp/alignment/software/. See, e.g., Altschul et al. (1990), J. Mol. Bioi. 215:403-10.

[0042] A DNA sequence that “encodes” a particular RNA is a DNA nucleic acid sequence that is transcribed into RNA. A DNA polynucleotide may encode an RNA (mRNA) that is translated into protein, or a DNA polynucleotide may encode an RNA that is not translated into protein (e.g. tRNA, rRNA, microRNA (miRNA), a “non-coding” RNA (ncRNA), a guide nucleic acid, etc.).

[0043] A “protein coding sequence” or a sequence that encodes a particular protein or polypeptide, is a nucleic acid sequence that is transcribed into mRNA (in the case of DNA) and is translated (in the case of mRNA) into a polypeptide in vitro or in vivo when placed under the control of appropriate regulatory sequences. The boundaries of the coding sequence are determined by a start codon at the 5′ terminus (N-terminus) and a translation stop nonsense codon at the 3′ terminus (C-terminus). A coding sequence can include, but is not limited to, cDNA from prokaryotic or eukaryotic mRNA, genomic DNA sequences from prokaryotic or eukaryotic DNA, and synthetic nucleic acids. A transcription termination sequence will usually be located 3′ to the coding sequence.

[0044] The term “naturally-occurring” or “unmodified” or “wild type” as used herein as applied to a nucleic acid, a polypeptide, a cell, or an organism, refers to a nucleic acid, polypeptide, cell, or organism that is found in nature. For example, a polypeptide or polynucleotide sequence that is present in an organism (including viruses) that can be isolated from a source in nature and which has not been intentionally modified by a human in the laboratory is wild type (and naturally occurring).

[0045] “Heterologous,” as used herein, means a nucleotide or polypeptide sequence that is not found in the native nucleic acid or protein, respectively. For example, in a chimeric Cas9 protein, the RNA-binding domain of a naturally-occurring bacterial Cas9 polypeptide (or a variant thereof) may be fused to a heterologous polypeptide sequence (i.e. a polypeptide sequence from a protein other than Cas9 or a polypeptide sequence from another organism). The heterologous polypeptide sequence may exhibit an activity (e.g., enzymatic activity) that will also be exhibited by the chimeric Cas9 protein (e.g., methyltransferase activity, acetyltransferase activity, kinase activity, ubiquitinating activity, etc.). A heterologous nucleic acid sequence may be linked to a naturally-occurring nucleic acid sequence (or a variant thereof) (e.g., by genetic engineering) to generate a chimeric nucleotide sequence encoding a chimeric polypeptide. As another example, in a fusion variant Cas9 polypeptide, a variant Cas9 polypeptide may be fused to a heterologous polypeptide (i.e. a polypeptide other than Cas9), which exhibits an activity that will also be exhibited by the fusion variant Cas9 polypeptide. A heterologous nucleic acid sequence may be linked to a variant Cas9 polypeptide (e.g., by genetic engineering) to generate a nucleotide sequence encoding a fusion variant polypeptide.

[0046] “Recombinant,” as used herein, means that a particular nucleic acid (DNA or RNA) is the product of various combinations of cloning, restriction, polymerase chain reaction (PCR) and/or ligation steps resulting in a construct having a structural coding or non-coding sequence distinguishable from endogenous nucleic acids found in natural systems. DNA sequences encoding polypeptides can be assembled from cDNA fragments or from a series of synthetic oligonucleotides, to provide a synthetic nucleic acid which is capable of being expressed from a recombinant transcriptional unit contained in a cell or in a cell-free transcription and translation system. Genomic DNA comprising the relevant sequences can also be used in the formation of a recombinant gene or transcriptional unit. Sequences of non-translated DNA may be present 5′ or 3′ from the open reading frame, where such sequences do not interfere with manipulation or expression of the coding regions, and may indeed act to modulate production of a desired product by various mechanisms (see “DNA regulatory sequences”, below). Alternatively, DNA sequences encoding RNA (e.g., guide nucleic acid) that is not translated may also be considered recombinant. Thus, e.g., the term “recombinant” nucleic acid refers to one which is not naturally occurring, e.g., is made by the artificial combination of two otherwise separated segments of sequence through human intervention. This artificial combination is often accomplished by either chemical synthesis means, or by the artificial manipulation of isolated segments of nucleic acids, e.g., by genetic engineering techniques. Such is usually done to replace a codon with a codon encoding the same amino acid, a conservative amino acid, or a non-conservative amino acid. Alternatively, it is performed to join together nucleic acid segments of desired functions to generate a desired combination of functions. This artificial combination is often accomplished by either chemical synthesis means, or by the artificial manipulation of isolated segments of nucleic acids, e.g., by genetic engineering techniques. When a recombinant polynucleotide encodes a polypeptide, the sequence of the encoded polypeptide can be naturally occurring (“wild type”) or can be a variant (e.g., a mutant) of the naturally occurring sequence. Thus, the term “recombinant” polypeptide does not necessarily refer to a polypeptide whose sequence does not naturally occur. Instead, a “recombinant” polypeptide is encoded by a recombinant DNA sequence, but the sequence of the polypeptide can be naturally occurring (“wild type”) or non-naturally occurring (e.g., a variant, a mutant, etc.). Thus, a “recombinant” polypeptide is the result of human intervention, but may be a naturally occurring amino acid sequence.

[0047] A cell has been “genetically modified” or “transformed” or “transfected” by exogenous DNA, e.g. a recombinant expression vector, when such DNA has been introduced inside the cell. The presence of the exogenous DNA results in permanent or transient genetic change. The transforming DNA may or may not be integrated (covalently linked) into the genome of the cell. In prokaryotes, yeast, and mammalian cells for example, the transforming DNA may be maintained on an episomal element such as a plasmid. With respect to eukaryotic cells, a stably transformed cell is one in which the transforming DNA has become integrated into a chromosome so that it is inherited by daughter cells through chromosome replication. This stability is demonstrated by the ability of the eukaryotic cell to establish cell lines or clones that comprise a population of daughter cells containing the transforming DNA. A “clone” is a population of cells derived from a single cell or common ancestor by mitosis. A “cell line” is a clone of a primary cell that is capable of stable growth in vitro for many generations.

[0048] A “target nucleic acid” as used herein is a polynucleotide (e.g., RNA, DNA) that includes a “target site” or “target sequence.” The terms “target site” or “target sequence” are used interchangeably herein to refer to a nucleic acid sequence present in a target nucleic acid to which a targeting segment of a subject guide nucleic acid will bind (see FIG. 8), provided sufficient conditions for binding exist. For example, the target site (or target sequence) 5′-GAGCAUAUC-3′ within a target nucleic acid is targeted by (or is bound by, or hybridizes with, or is complementary to) the sequence 5′-GAUAUGCUC-3′. Suitable hybridization conditions include physiological conditions normally present in a cell. For a double stranded target nucleic acid, the strand of the target nucleic acid that is complementary to and hybridizes with the guide nucleic acid is referred to as the “complementary strand”; while the strand of the target nucleic acid that is complementary to the “complementary strand” (and is therefore not complementary to the guide nucleic acid) is referred to as the “noncomplementary strand” or “non-complementary strand”. In cases where the target nucleic acid is a single stranded target nucleic acid (e.g., single stranded DNA (ssDNA), single stranded RNA (ssRNA)), the guide nucleic acid is complementary to and hybridizes with single stranded target nucleic acid.

[0049] By “Cas9 polypeptide” or “site-directed polypeptide” or “site-directed Cas9 polypeptide” it is meant a polypeptide that binds RNA (e.g., the protein binding segment of a guide nucleic acid) and is targeted to a specific sequence (a target site) in a target nucleic acid. A Cas9 polypeptide as described herein is targeted to a target site by the guide nucleic acid to which it is bound. The guide nucleic acid comprises a sequence that is complementary to a target sequence within the target nucleic acid, thus targeting the bound Cas9 polypeptide to a specific location within the target nucleic acid (the target sequence) (e.g., stabilizing the interaction of Cas9 with the target nucleic acid). In some cases, the Cas9 polypeptide is a naturally-occurring polypeptide (e.g., naturally occurs in bacterial and/or archaeal cells). In other cases, the Cas9 polypeptide is not a naturally-occurring polypeptide (e.g., the Cas9 polypeptide is a variant Cas9 polypeptide, a chimeric polypeptide as discussed below, and the like).Exemplary Cas9 polypeptides are set forth in SEQ ID NOs: 5-826 as a non-limiting and non-exhaustive list. Naturally occurring Cas9 polypeptides bind a guide nucleic acid, are thereby directed to a specific sequence within a target nucleic acid (a target site), and cleave the target nucleic acid (e.g., cleave dsDNA to generate a double strand break, cleave ssDNA, cleave ssRNA, etc.). A subject Cas9 polypeptide comprises two portions, an RNA-binding portion and an activity portion. An RNA-binding portion interacts with a subject guide nucleic acid. An activity portion exhibits site-directed enzymatic activity (e.g., nuclease activity, activity for DNA and/or RNA methylation, activity for DNA and/or RNA cleavage, activity for histone acetylation, activity for histone methylation, activity for RNA modification, activity for RNA-binding, activity for RNA splicing etc.). In some cases, the activity portion exhibits reduced nuclease activity relative to the corresponding portion of a wild type Cas9 polypeptide. In some cases, the activity portion is enzymatically inactive.

[0050] By “cleavage” it is meant the breakage of the covalent backbone of a target nucleic acid molecule (e.g., RNA, DNA). Cleavage can be initiated by a variety of methods including, but not limited to, enzymatic or chemical hydrolysis of a phosphodiester bond. Both single-stranded cleavage and double-stranded cleavage are possible, and double-stranded cleavage can occur as a result of two distinct single-stranded cleavage events. In certain embodiments, a complex comprising a guide nucleic acid and a Cas9 polypeptide is used for targeted cleavage of a single stranded target nucleic acid (e.g., ssRNA, ssDNA).

[0051] “Nuclease” and “endonuclease” are used interchangeably herein to mean an enzyme which possesses catalytic activity for nucleic acid cleavage (e.g., ribonuclease activity (ribonucleic acid cleavage), deoxyribonuclease activity (deoxyribonucleic acid cleavage), etc.).

[0052] By “cleavage domain” or “active domain” or “nuclease domain” of a nuclease it is meant the polypeptide sequence or domain within the nuclease which possesses the catalytic activity for nucleic acid cleavage. A cleavage domain can be contained in a single polypeptide chain or cleavage activity can result from the association of two (or more) polypeptides. A single nuclease domain may consist of more than one isolated stretch of amino acids within a given polypeptide.

[0053] A nucleic acid molecule that binds to the Cas9 polypeptide and targets the polypeptide to a specific location within the target nucleic acid is referred to herein as a “guide nucleic acid”. When the guide nucleic acid is an RNA molecule, it can be referred to as a “guide RNA” or a “gRNA”. A guide nucleic acid comprises two segments, a first segment (referred to herein as a “targeting segment”); and a second segment (referred to herein as a “protein-binding segment”). By “segment” it is meant a segment/section/region of a molecule, e.g., a contiguous stretch of nucleotides in a nucleic acid molecule. A segment can also mean a region/section of a complex such that a segment may comprise regions of more than one molecule. For example, in some cases the protein-binding segment (described below) of a guide nucleic acid is one nucleic acid molecule (e.g., one RNA molecule) and the protein-binding segment therefore comprises a region of that one molecule. In other cases, the protein-binding segment (described below) of a guide nucleic acid comprises two separate molecules that are hybridized along a region of complementarity. As an illustrative, non-limiting example, a protein-binding segment of a guide nucleic acid that comprises two separate molecules can comprise (i) base pairs 40-75 of a first molecule (e.g., RNA molecule, DNA/RNA hybrid molecule) that is 100 base pairs in length; and (ii) base pairs 10-25 of a second molecule (e.g., RNA molecule) that is 50 base pairs in length. The definition of “segment,” unless otherwise specifically defined in a particular context, is not limited to a specific number of total base pairs, is not limited to any particular number of base pairs from a given nucleic acid molecule, is not limited to a particular number of separate molecules within a complex, and may include regions of nucleic acid molecules that are of any total length and may or may not include regions with complementarity to other molecules.

[0054] The first segment (targeting segment) of a guide nucleic acid (e.g., guide RNA) comprises a nucleotide sequence that is complementary to a specific sequence (a target site) within a target nucleic acid (e.g., a target ssRNA, a target ssDNA, the complementary strand of a double stranded target DNA, etc.). The protein-binding segment (or “protein-binding sequence”) interacts with a Cas9 polypeptide. Site-specific binding and/or cleavage of the target nucleic acid can occur at locations determined by base-pairing complementarity between the guide nucleic acid (e.g., guide RNA) and the target nucleic acid.

[0055] The protein-binding segment of a subject guide nucleic acid comprises two complementary stretches of nucleotides that hybridize to one another to form a double stranded RNA duplex (dsRNA duplex).

[0056] In some embodiments, a subject nucleic acid (e.g., a guide nucleic acid, a nucleic acid comprising a nucleotide sequence encoding a guide nucleic acid; a nucleic acid encoding a Cas9 polypeptide; etc.) comprises a modification or sequence (e.g., an additional segment at the 5′ and/or 3′ end) that provides for an additional desirable feature (e.g., modified or regulated stability; subcellular targeting; tracking, e.g., a fluorescent label; a binding site for a protein or protein complex; etc.). Non-limiting examples include: a 5′ cap (e.g., a 7-methylguanylate cap (m7G)); a 3′ polyadenylated tail (i.e., a 3′ poly(A) tail); a ribozyme sequence (e.g. to allow for self-cleavage and release of a mature molecule in a regulated fashion); a riboswitch sequence (e.g., to allow for regulated stability and/or regulated accessibility by proteins and/or protein complexes); a stability control sequence; a sequence that forms a dsRNA duplex (i.e., a hairpin)); a modification or sequence that targets the nucleic acid to a subcellular location (e.g., nucleus, mitochondria, chloroplasts, and the like); a modification or sequence that provides for tracking (e.g., direct conjugation to a fluorescent molecule, conjugation to a moiety that facilitates fluorescent detection, a sequence that allows for fluorescent detection, etc.); a modification or sequence that provides a binding site for proteins (e.g., proteins that act on DNA and/or RNA, including transcriptional activators, transcriptional repressors, DNA methyltransferases, DNA demethylases, histone acetyltransferases, histone deacetylases, and the like); and combinations thereof.

[0057] A subject guide nucleic acid (e.g., guide RNA) and a subject Cas9 polypeptide form a complex (i.e., bind via non-covalent interactions). The guide nucleic acid (e.g., guide RNA) provides target specificity to the complex by comprising a nucleotide sequence that is complementary to a sequence of a target nucleic acid. The Cas9 polypeptide of the complex provides the site-specific activity. In other words, the Cas9 polypeptide is guided to a target nucleic acid sequence (e.g. a target sequence in a chromosomal nucleic acid; a target sequence in an extrachromosomal nucleic acid, e.g. an episomal nucleic acid, a minicircle, an RNA, a DNA, etc.; a target sequence in a mitochondrial nucleic acid; a target sequence in a chloroplast nucleic acid; a target sequence in a plasmid; etc.) by virtue of its association with the protein-binding segment of the guide nucleic acid.

[0058] In some embodiments, a subject guide nucleic acid (e.g., guide RNA) comprises two separate nucleic acid molecules: an “activator” and a “targeter” (see below) and is referred to herein as a “dual guide nucleic acid”, a “double-molecule guide nucleic acid”, or a “two-molecule guide nucleic acid.” If both molecules of a dual guide nucleic acid are RNA molecules, the dual guide nucleic acid can be referred to as a “dual guide RNA” or a “dgRNA.” In some embodiments, the subject guide nucleic acid is a single nucleic acid molecule (single polynucleotide) and is referred to herein as a “single guide nucleic acid”, a “single-molecule guide nucleic acid,” or a “one-molecule guide nucleic acid.” If a single guide nucleic acid is an RNA molecule, it can be referred to as a “single guide RNA” or an “sgRNA.” The term “guide nucleic acid” is inclusive, referring to both dual guide nucleic acids and to single guide nucleic acids (e.g., dgRNAs, sgRNAs, etc.) while the term “guide RNA” is also inclusive, referring to both dual guide RNA (dgRNA) and single guide RNA (sgRNA).

[0059] In some cases, a guide nucleic acid is a DNA/RNA hybrid molecule. In such cases, the protein-binding segment of the guide nucleic acid is RNA and forms an RNA duplex. However, the targeting segment of a guide nucleic acid can be DNA. Thus, if a DNA/RNA hybrid guide nucleic acid is a dual guide nucleic acid, the “targeter” molecule and be a hybrid molecule (e.g., the targeting segment can be DNA and the duplex-forming segment can be RNA). In such cases, the duplex-forming segment of the “activator” molecule can be RNA (e.g., in order to form an RNA-duplex with the duplex-forming segment of the targeter molecule), while nucleotides of the “activator” molecule that are outside of the duplex-forming segment can be DNA (in which case the activator molecule is a hybrid DNA/RNA molecule) or can be RNA (in which case the activator molecule is RNA). If a DNA/RNA hybrid guide nucleic acid is a single guide nucleic acid, then the targeting segment can be DNA, the duplex-forming segments (which make up the protein-binding segment) can be RNA, and nucleotides outside of the targeting and duplex-forming segments can be RNA or DNA.

[0060] An exemplary dual guide nucleic acid comprises a crRNA-like (“CRISPR RNA” or “targeter” or “crRNA” or “crRNA repeat”) molecule and a corresponding tracrRNA-like (“trans-acting CRISPR RNA” or “activator” or “tracrRNA”) molecule. A crRNA-like molecule (targeter) comprises both the targeting segment (single stranded) of the guide nucleic acid and a stretch (“duplex-forming segment”) of nucleotides that forms one half of the dsRNA duplex of the protein-binding segment of the guide nucleic acid. A corresponding tracrRNA-like molecule (activator) comprises a stretch of nucleotides (duplex-forming segment) that forms the other half of the dsRNA duplex of the protein-binding segment of the guide nucleic acid. In other words, a stretch of nucleotides of a crRNA-like molecule are complementary to and hybridize with a stretch of nucleotides of a tracrRNA-like molecule to form the dsRNA duplex of the protein-binding domain of the guide nucleic acid. As such, each crRNA-like molecule can be said to have a corresponding tracrRNA-like molecule. The crRNA-like molecule additionally provides the single stranded targeting segment. Thus, a crRNA-like and a tracrRNA-like molecule (as a corresponding pair) hybridize to form a dual guide nucleic acid. The exact sequence of a given crRNA or tracrRNA molecule is characteristic of the species in which the RNA molecules are found. A dual guide nucleic acid can include any corresponding activator and targeter pair.

[0061] The term “activator” is used herein to refer to a tracrRNA-like molecule of a dual guide nucleic acid (and of a single guide nucleic acid when the “activator” and the “targeter” are linked together by intervening nucleic acids). The term “targeter” is used herein to refer to a crRNA-like molecule of a dual guide nucleic acid (and of a single guide nucleic acid when the “activator” and the “targeter” are linked together by intervening nucleic acids). The term “duplex-forming segment” is used herein to mean the stretch of nucleotides of an activator or a targeter that contributes to the formation of the dsRNA duplex by hybridizing to a stretch of nucleotides of a corresponding activator or targeter molecule. In other words, an activator comprises a duplex-forming segment that is complementary to the duplex-forming segment of the corresponding targeter. As such, an activator comprises a duplex-forming segment while a targeter comprises both a duplex-forming segment and the targeting segment of the guide nucleic acid. A subject single guide nucleic acid can comprise an “activator” and a “targeter” where the “activator” and the “targeter” are covalently linked (e.g., by intervening nucleotides). Therefore, a dual guide nucleic acid can be comprised of any corresponding activator and targeter pair.

[0062] A “host cell” or “target cell” as used herein, denotes an in vivo or in vitro eukaryotic cell, or a cell from a multicellular organism (e.g., a cell line) cultured as a unicellular entity, which eukaryotic cells can be, or have been, used as recipients for a nucleic acid, and include the progeny of the original cell which has been transformed by the nucleic acid. It is understood that the progeny of a single cell may not necessarily be completely identical in morphology or in genomic or total DNA complement as the original parent, due to natural, accidental, or deliberate mutation. A “recombinant host cell” (also referred to as a “genetically modified host cell”) is a host cell into which has been introduced a heterologous nucleic acid, e.g., an expression vector. For example, a subject eukaryotic host cell is a genetically modified eukaryotic host cell, by virtue of introduction into a suitable eukaryotic host cell of an exogenous nucleic acid.

[0063] The term “stem cell” is used herein to refer to a cell (e.g., plant stem cell, vertebrate stem cell) that has the ability both to self-renew and to generate a differentiated cell type (see Morrison et al. (1997) Cell 88:287-298). In the context of cell ontogeny, the adjective “differentiated”, or “differentiating” is a relative term. A “differentiated cell” is a cell that has progressed further down the developmental pathway than the cell it is being compared with. Thus, pluripotent stem cells (described below) can differentiate into lineage-restricted progenitor cells (e.g., mesodermal stem cells), which in turn can differentiate into cells that are further restricted (e.g., neuron progenitors), which can differentiate into end-stage cells (i.e., terminally differentiated cells, e.g., neurons, cardiomyocytes, etc.), which play a characteristic role in a certain tissue type, and may or may not retain the capacity to proliferate further. Stem cells may be characterized by both the presence of specific markers (e.g., proteins, RNAs, etc.) and the absence of specific markers. Stem cells may also be identified by functional assays both in vitro and in vivo, particularly assays relating to the ability of stem cells to give rise to multiple differentiated progeny.

[0064] Stem cells of interest include pluripotent stem cells (PSCs). The term “pluripotent stem cell” or “PSC” is used herein to mean a stem cell capable of producing all cell types of the organism. Therefore, a PSC can give rise to cells of all germ layers of the organism (e.g., the endoderm, mesoderm, and ectoderm of a vertebrate). Pluripotent cells are capable of forming teratomas and of contributing to ectoderm, mesoderm, or endoderm tissues in a living organism. Pluripotent stem cells of plants are capable of giving rise to all cell types of the plant (e.g., cells of the root, stem, leaves, etc.).

[0065] PSCs of animals can be derived in a number of different ways. For example, embryonic stem cells (ESCs) are derived from the inner cell mass of an embryo (Thomson et. al, Science. 1998 Nov. 6; 282(5391):1145-7) whereas induced pluripotent stem cells (iPSCs) are derived from somatic cells (Takahashi et. al, Cell. 2007 Nov. 30; 131(5):861-72; Takahashi et. al, Nat Protoc. 2007; 2(12):3081-9; Yu et. al, Science. 2007 Dec. 21; 318(5858):1917-20. Epub 2007 Nov. 20). Because the term PSC refers to pluripotent stem cells regardless of their derivation, the term PSC encompasses the terms ESC and iPSC, as well as the term embryonic germ stem cells (EGSC), which are another example of a PSC. PSCs may be in the form of an established cell line, they may be obtained directly from primary embryonic tissue, or they may be derived from a somatic cell. PSCs can be target cells of the methods described herein.

[0066] By “embryonic stem cell” (ESC) is meant a PSC that was isolated from an embryo, typically from the inner cell mass of the blastocyst. ESC lines are listed in the NIH Human Embryonic Stem Cell Registry, e.g. hESBGN-01, hESBGN-02, hESBGN-03, hESBGN-04 (BresaGen, Inc.); HES-1, HES-2, HES-3, HES-4, HES-5, HES-6 (ES Cell International); Miz-hES1 (MizMedi Hospital-Seoul National University); HSF-1, HSF-6 (University of California at San Francisco); and H1, H7, H9, H13, H14 (Wisconsin Alumni Research Foundation (WiCell Research Institute)). Stem cells of interest also include embryonic stem cells from other primates, such as Rhesus stem cells and marmoset stem cells. The stem cells may be obtained from any mammalian species, e.g. human, equine, bovine, porcine, canine, feline, rodent, e.g. mice, rats, hamster, primate, etc. (Thomson et al. (1998) Science 282:1145; Thomson et al. (1995) Proc. Natl. Acad. Sci USA 92:7844; Thomson et al. (1996) Biol. Reprod. 55:254; Shamblott et al., Proc. Natl. Acad. Sci. USA 95:13726, 1998). In culture, ESCs typically grow as flat colonies with large nucleo-cytoplasmic ratios, defined borders and prominent nucleoli. In addition, ESCs express SSEA-3, SSEA-4, TRA-1-60, TRA-1-81, and Alkaline Phosphatase, but not SSEA-1. Examples of methods of generating and characterizing ESCs may be found in, for example, U.S. Pat. No. 7,029,913, U.S. Pat. No. 5,843,780, and U.S. Pat. No. 6,200,806, the disclosures of which are incorporated herein by reference. Methods for proliferating hESCs in the undifferentiated form are described in WO 99/20741, WO 01/51616, and WO 03/020920.

[0067] By “embryonic germ stem cell” (EGSC) or “embryonic germ cell” or “EG cell” is meant a PSC that is derived from germ cells and/or germ cell progenitors, e.g. primordial germ cells, i.e. those that would become sperm and eggs. Embryonic germ cells (EG cells) are thought to have properties similar to embryonic stem cells as described above. Examples of methods of generating and characterizing EG cells may be found in, for example, U.S. Pat. No. 7,153,684; Matsui, Y., et al., (1992) Cell 70:841; Shamblott, M., et al. (2001) Proc. Natl. Acad. Sci. USA 98: 113; Shamblott, M., et al. (1998) Proc. Natl. Acad. Sci. USA, 95:13726; and Koshimizu, U., et al. (1996) Development, 122:1235, the disclosures of which are incorporated herein by reference.

[0068] By “induced pluripotent stem cell” or “iPSC” it is meant a PSC that is derived from a cell that is not a PSC (i.e., from a cell this is differentiated relative to a PSC). iPSCs can be derived from multiple different cell types, including terminally differentiated cells. iPSCs have an ES cell-like morphology, growing as flat colonies with large nucleo-cytoplasmic ratios, defined borders and prominent nuclei. In addition, iPSCs express one or more key pluripotency markers known by one of ordinary skill in the art, including but not limited to Alkaline Phosphatase, SSEA3, SSEA4, Sox2, Oct3/4, Nanog, TRA160, TRA181, TDGF 1, Dnmt3b, FoxD3, GDF3, Cyp26a1, TERT, and zfp42. Examples of methods of generating and characterizing iPSCs may be found in, for example, U.S. Patent Publication Nos. US20090047263, US20090068742, US20090191159, US20090227032, US20090246875, and US20090304646, the disclosures of which are incorporated herein by reference. Generally, to generate iPSCs, somatic cells are provided with reprogramming factors (e.g. Oct4, SOX2, KLF4, MYC, Nanog, Lin28, etc.) known in the art to reprogram the somatic cells to become pluripotent stem cells.

[0069] By “somatic cell” it is meant any cell in an organism that, in the absence of experimental manipulation, does not ordinarily give rise to all types of cells in an organism. In other words, somatic cells are cells that have differentiated sufficiently that they will not naturally generate cells of all three germ layers of the body, i.e. ectoderm, mesoderm and endoderm. For example, somatic cells would include both neurons and neural progenitors, the latter of which may be able to naturally give rise to all or some cell types of the central nervous system but cannot give rise to cells of the mesoderm or endoderm lineages.

[0070] By “mitotic cell” it is meant a cell undergoing mitosis. Mitosis is the process by which a eukaryotic cell separates the chromosomes in its nucleus into two identical sets in two separate nuclei. It is generally followed immediately by cytokinesis, which divides the nuclei, cytoplasm, organelles and cell membrane into two cells containing roughly equal shares of these cellular components.

[0071] By “post-mitotic cell” it is meant a cell that has exited from mitosis, i.e., it is “quiescent”, i.e. it is no longer undergoing divisions. This quiescent state may be temporary, i.e. reversible, or it may be permanent.

[0072] By “meiotic cell” it is meant a cell that is undergoing meiosis. Meiosis is the process by which a cell divides its nuclear material for the purpose of producing gametes or spores. Unlike mitosis, in meiosis, the chromosomes undergo a recombination step which shuffles genetic material between chromosomes. Additionally, the outcome of meiosis is four (genetically unique) haploid cells, as compared with the two (genetically identical) diploid cells produced from mitosis.

[0073] The terms “treatment”, “treating” and the like are used herein to generally mean obtaining a desired pharmacologic and/or physiologic effect. The effect may be prophylactic in terms of completely or partially preventing a disease or symptom thereof and/or may be therapeutic in terms of a partial or complete cure for a disease and/or adverse effect attributable to the disease. “Treatment” as used herein covers any treatment of a disease or symptom in a mammal, and includes: (a) preventing the disease or symptom from occurring in a subject which may be predisposed to acquiring the disease or symptom but has not yet been diagnosed as having it; (b) inhibiting the disease or symptom, i.e., arresting its development; or (c) relieving the disease, i.e., causing regression of the disease. The therapeutic agent may be administered before, during or after the onset of disease or injury. The treatment of ongoing disease, where the treatment stabilizes or reduces the undesirable clinical symptoms of the patient, is of particular interest. Such treatment is desirably performed prior to complete loss of function in the affected tissues. The subject therapy will desirably be administered during the symptomatic stage of the disease, and in some cases after the symptomatic stage of the disease.

[0074] The terms “individual,” “subject,” “host,” and “patient,” are used interchangeably herein and refer to any mammalian subject for whom diagnosis, treatment, or therapy is desired, particularly humans.

[0075] In some instances, a component (e.g., a nucleic acid component (e.g., a guide nucleic acid, etc.);

[0076] a protein component (e.g., a Cas9 polypeptide, a variant Cas9 polypeptide); and the like) includes a label moiety. The terms “label”, “detectable label”, or “label moiety” as used herein refer to any moiety that provides for signal detection and may vary widely depending on the particular nature of the assay. Label moieties of interest include both directly detectable labels (direct labels)(e.g., a fluorescent label) and indirectly detectable labels (indirect labels)(e.g., a binding pair member). A fluorescent label can be any fluorescent label (e.g., a fluorescent dye (e.g., fluorescein, Texas red, rhodamine, ALEXAFLUOR® labels, and the like), a fluorescent protein (e.g., green fluorescent protein (GFP), enhanced GFP (EGFP), yellow fluorescent protein (YFP), red fluorescent protein (RFP), cyan fluorescent protein (CFP), cherry, tomato, tangerine, and any fluorescent derivative thereof), etc.). Suitable detectable (directly or indirectly) label moieties for use in the methods include any moiety that is detectable by spectroscopic, photochemical, biochemical, immunochemical, electrical, optical, chemical, or other means. For example, suitable indirect labels include biotin (a binding pair member), which can be bound by streptavidin (which can itself be directly or indirectly labeled). Labels can also include: a radiolabel (a direct label)(e.g., ³H, ¹²⁵I, ³⁵S, or ³²P); an enzyme (an indirect label)(e.g., peroxidase, alkaline phosphatase, galactosidase, luciferase, glucose oxidase, and the like); a fluorescent protein (a direct label)(e.g., green fluorescent protein, red fluorescent protein, yellow fluorescent protein, and any convenient derivatives thereof); a metal label (a direct label); a colorimetric label; a binding pair member; and the like. By “partner of a binding pair” or “binding pair member” is meant one of a first and a second moiety, wherein the first and the second moiety have a specific binding affinity for each other. Suitable binding pairs include, but are not limited to: antigen/antibodies (for example, digoxigenin/anti-digoxigenin, dinitrophenyl (DNP)/anti-DNP, dansyl-X-anti-dansyl, fluorescein/anti-fluorescein, lucifer yellow/anti-lucifer yellow, and rhodamine anti-rhodamine), biotin/avidin (or biotin/streptavidin) and calmodulin binding protein (CBP)/calmodulin. Any binding pair member can be suitable for use as an indirectly detectable label moiety.

[0077] Any given component, or combination of components can be unlabeled, or can be detectably labeled with a label moiety. In some cases, when two or more components are labeled, they can be labeled with label moieties that are distinguishable from one another.

[0078] General methods in molecular and cellular biochemistry can be found in such standard textbooks as Molecular Cloning: A Laboratory Manual, 3rd Ed. (Sambrook et al., HaRBor Laboratory Press 2001); Short Protocols in Molecular Biology, 4th Ed. (Ausubel et al. eds., John Wiley & Sons 1999); Protein Methods (Bollag et al., John Wiley & Sons 1996); Nonviral Vectors for Gene Therapy (Wagner et al. eds., Academic Press 1999); Viral Vectors (Kaplift & Loewy eds., Academic Press 1995); Immunology Methods Manual (I. Lefkovits ed., Academic Press 1997); and Cell and Tissue Culture: Laboratory Procedures in Biotechnology (Doyle & Griffiths, John Wiley & Sons 1998), the disclosures of which are incorporated herein by reference.

[0079] Before the present invention is further described, it is to be understood that this invention is not limited to particular embodiments described, as such may, of course, vary. It is also to be understood that the terminology used herein is for the purpose of describing particular embodiments only, and is not intended to be limiting, since the scope of the present invention will be limited only by the appended claims.

[0080] Where a range of values is provided, it is understood that each intervening value, to the tenth of the unit of the lower limit unless the context clearly dictates otherwise, between the upper and lower limit of that range and any other stated or intervening value in that stated range, is encompassed within the invention. The upper and lower limits of these smaller ranges may independently be included in the smaller ranges, and are also encompassed within the invention, subject to any specifically excluded limit in the stated range. Where the stated range includes one or both of the limits, ranges excluding either or both of those included limits are also included in the invention.

[0081] Unless defined otherwise, all technical and scientific terms used herein have the same meaning as commonly understood by one of ordinary skill in the art to which this invention belongs. Although any methods and materials similar or equivalent to those described herein can also be used in the practice or testing of the present invention, the preferred methods and materials are now described. All publications mentioned herein are incorporated herein by reference to disclose and describe the methods and/or materials in connection with which the publications are cited.

[0082] It must be noted that as used herein and in the appended claims, the singular forms “a,” “an,” and “the” include plural referents unless the context clearly dictates otherwise. Thus, for example, reference to “a complex” includes a plurality of such complexes and reference to “the Cas9 polypeptide” includes reference to one or more Cas9 polypeptides and equivalents thereof known to those skilled in the art, and so forth. It is further noted that the claims may be drafted to exclude any optional element. As such, this statement is intended to serve as antecedent basis for use of such exclusive terminology as “solely,” “only” and the like in connection with the recitation of claim elements, or use of a “negative” limitation.

[0083] It is appreciated that certain features of the invention, which are, for clarity, described in the context of separate embodiments, may also be provided in combination in a single embodiment. Conversely, various features of the invention, which are, for brevity, described in the context of a single embodiment, may also be provided separately or in any suitable sub-combination. All combinations of the embodiments pertaining to the invention are specifically embraced by the present invention and are disclosed herein just as if each and every combination was individually and explicitly disclosed. In addition, all sub-combinations of the various embodiments and elements thereof are also specifically embraced by the present invention and are disclosed herein just as if each and every such sub-combination was individually and explicitly disclosed herein.

[0084] The publications discussed herein are provided solely for their disclosure prior to the filing date of the present application. Nothing herein is to be construed as an admission that the present invention is not entitled to antedate such publication by virtue of prior invention. Further, the dates of publication provided may be different from the actual publication dates which may need to be independently confirmed.

### DETAILED DESCRIPTION

[0085] The present disclosure provides a complex comprising a nucleic acid-conjugated nanoparticle; a Type II or a Type V CRISPR system comprising a site-directed DNA-modifying polypeptide and a guide RNA; and a polycation-based endosomal escape polymer. The present disclosure provides methods of making and using a complex of the present disclosure.

### Complex

[0086] The present disclosure provides a complex comprising: a) a nanoparticle-nucleic acid conjugate; a Type II or a Type V CRISPR system comprising a site-directed DNA-modifying polypeptide and a guide RNA, and optionally also comprising a donor polynucleotide (e.g., a DNA donor template); and b) a polycation-based endosomal escape polymer. A complex of the present disclosure is also referred to herein as “an encapsulated complex,” “an encapsulated Type II or Type V CRISPR complex,” “an encapsulated nanoparticle complex,” or “an encapsulated Type II or Type V CRISPR nanoparticle complex.”

[0087] The present disclosure provides a complex comprising: a) a nanoparticle-nucleic acid conjugate; a Type II CRISPR system comprising a Cas9 polypeptide and a guide RNA, and optionally also comprising a donor polynucleotide (e.g., a DNA donor template); and b) a polycation-based endosomal escape polymer. A complex of the present disclosure that comprises a Type II CRISPR system is also referred to herein as “an encapsulated Type II CRISPR complex,” or “an encapsulated Type II CRISPR nanoparticle complex.”

[0088] The present disclosure provides a complex comprising: a) a nanoparticle-nucleic acid conjugate; a Type V CRISPR system comprising a Cfp1 polypeptide and a guide RNA, and optionally also comprising a donor polynucleotide (e.g., a DNA donor template); and b) a polycation-based endosomal escape polymer. A complex of the present disclosure that comprises a Type V CRISPR system is also referred to herein as “an encapsulated Type V CRISPR complex,” or “an encapsulated Type V CRISPR nanoparticle complex.”

[0089] A complex of the present disclosure exhibits low toxicity toward a target cell. In some cases, less than 40%, less than 30%, less than 25%, less than 20%, less than 15%, less than 10%, less than 5%, or less than 2%, of the cells of a target cell population are killed following contact with a complex of the present disclosure. In some cases, at least 60%, at least 70%, at least 75%, at least 80%, at least 85%, at least 90%, at least 95%, at least 98%, or more than 98%, of the cells of a target cell population remain viable following contact with a complex of the present disclosure.

[0090] In some cases, a complex of the present disclosure has a zeta potential of from −20 mV to 20 mV, e.g., from −20 mV to −15 mV, from −15 mV to −10 mV, from −10 mV to −5 mV, from −5 mV to 0.5 mV, from 0.5 mV to 5 mV, from 5 mV to 10 mV, from 10 mV to 15 mV, or from 15 mV to 20 mV.

[0091] As noted above, in some cases, a complex of the present disclosure comprises a donor polynucleotide. For example, in some cases, a complex of the present disclosure comprises: a) a nanoparticle-nucleic acid conjugate; a Type II or a Type V CRISPR system comprising a site-directed DNA-modifying polypeptide and a guide RNA, and a donor polynucleotide (e.g., a DNA donor template); and b) a polycation-based endosomal escape polymer. In some cases, the amount donor polynucleotide (donor DNA) in a complex of the present disclosure is from about 0.1 μg to 10 μg, e.g., from about 0.1 μg to about 0.5 μg, from about 0.5 μg to about 1 μg, from about 1 μg to about 2 μg, from about 2 μg to about 4 μg, from about 4 μg to about 6 μg, from about 6 μg to about 8 μg, or from about 8 μg to about 10 μg. In some cases, the amount of RNA-guided endoribonuclease (e.g., Cas9, Cpf1, etc.) polypeptide in a complex of the present disclosure is from about 1 μg to about 20 μg, e.g., from about 1 μg to about 2 μg, from about 2 μg to about 4 μg, from about 4 μg to about 6 μg, from about 6 μg to about 8 μg, from about 8 μg to about 10 μg, from about 10 μg to about 12 μg, from about 12 μg to about 14 μg, from about 14 μg to about 16 μg, from about 16 μg to about 18 μg, or from about 18 μg to about 20 μg. In some cases, a complex of the present disclosure comprises 4 μg donor DNA and 8 μg Cas9.

### Nanoparticle-Nucleic Acid Conjugates

[0092] A complex of the present disclosure comprises a nanoparticle-nucleic acid conjugate. In some cases, a complex of the present disclosure comprises a colloidal metal nanoparticle that comprises a nucleic acid. Thus, aspects of the present disclosure include nanoparticles conjugated with a nucleic acid. In some cases, the nanoparticles comprise any suitable biocompatible polymer. In some cases, the nanoparticles comprise any suitable colloidal metal. A colloidal metal includes any water-insoluble metal particle or metallic compound dispersed in liquid water. A colloid metal can be a suspension of metal particles in aqueous solution. Any metal that can be made in colloidal form can be used, including gold, silver, copper, nickel, aluminum, zinc, calcium, platinum, palladium, and iron. In some cases, gold nanoparticles are used, e.g., prepared from HAuCl₄. In some cases, the nanoparticles are non-gold nanoparticles that are coated with gold to make gold-coated nanoparticles.

### Nanoparticles

[0093] Nanoparticles suitable for use in a complex of the present disclosure can be any shape and can range in size from about 5 nm to about 1000 nm in size, e.g., from about 5 nm to about 75 nm, about 5 to about 50 nm, about 5 nm to about 40 nm, about 10 nm to about 30, including about 20 nm to about 30 nm in size. Nanoparticles (e.g., gold nanoparticles) suitable for use in a complex of the present disclosure can have a size in the range of from about 5 nm to about 50 nm, e.g., from about 5 nm to about 10 nm, from about 10 nm to about 15 nm, from 15 nm to about 20 nm, from about 20 nm to about 25 nm, from about 25 nm to about 30 nm, from about 30 nm to about 35 nm, from about 35 nm to about 40 nm, from about 40 nm to about 45 nm, or from about 45 nm to about 50 nm. Nanoparticles suitable for use in a complex of the present disclosure can have a size from about 50 nm to about 55 nm, from about 55 nm to about 60 nm, from about 60 nm to about 65 nm, from about 65 nm to about 70 nm, to about 70 nm to about 75 nm, from about 75 nm to about 80 nm, from about 80 nm to about 85 nm, from about 85 nm to about 90 nm, from about 90 nm to about 95 nm, from about 95 nm to about 100 nm, from about 100 nm to about 105 nm, from about 105 nm to about 110 nm, from about 110 nm to about 115 nm, from about 115 nm to about 120 nm, from about 120 nm to about 125 nm, from about 125 nm to about 130 nm, from about 130 nm to about 135 nm, from about 135 nm to about 140 nm, from about 140 nm to about 145 nm, from about 145 nm to about 150 nm. Nanoparticles suitable for use in a complex of the present disclosure can have a size of from about 100 nm to about 500 nm, e.g., from about 100 nm to about 150 nm, from about 150 nm to about 200 nm, from about 200 nm to about 250 nm, from about 250 nm to about 300 nm, from about 300 nm to about 350 nm, from about 350 nm to about 400 nm, from about 400 nm to about 450 nm, or from about 450 nm to about 500 nm.

[0094] Nanoparticles suitable for use in a complex of the present disclosure can have a size of from about 500 nm to 10 μm, e.g., from about 500 nm to about 750 nm, from about 750 nm to about 1 μm, from about 1 μm to about 2 μm, from about 2 μm to about 5 μm, from about 5 μm to about 7 μm, or from about 7 μm to about 10 μm. Nanoparticles suitable for use in a complex of the present disclosure can have a size of from about 10 μm to about 100 μm, e.g., from about 10 μm to about 20 μm, from about 20 μm to about 30 μm, from about 30 μm to about 40 μm, from about 40 μm to about 50 μm, from about 50 μm to about 60 μm, from about 60 μm to about 70 μm, from about 70 μm to about 80 μm, from about 80 μm to about 90 μm, or from about 90 μm to about 100 μm.

[0095] A nanoparticle can comprise any suitable material, e.g., a biocompatible material. The biocompatible material can be a polymer. Suitable nanoparticle polymers include polystyrene, silicone rubber, polycarbonate, polyurethanes, polypropylenes, polymethylmethacrylate, polyvinyl chloride, polyesters, polyethers, and polyethylene. Non-limiting examples of specific polymers include poly(caprolactone) (PCL), ethylene vinyl acetate polymer (EVA), poly(lactic acid) (PLA), poly(L-lactic acid) (PLLA), poly(glycolic acid) (PGA), poly(lactic acid-co-glycolic acid) (PLGA), poly(L-lactic acid-co-glycolic acid) (PLLGA), poly(D,L-lactide) (PDLA), poly(L-lactide) (PLLA), poly(D,L-lactide-co-caprolactone), poly(D,L-lactide-co-caprolactone-co-glycolide), poly(D,L-lactide-co-PEO-co-D,L-lactide), poly(D,L-lactide-co-PPO-co-D,L-lactide), polyalkyl cyanoacralate, polyurethane, poly-L-lysine (PLL), hydroxypropyl methacrylate (HPMA), polyethyleneglycol, poly-L-glutamic acid, poly(hydroxy acids), polyanhydrides, polyorthoesters, poly(ester amides), polyamides, poly(ester ethers), polycarbonates, polyalkylenes such as polyethylene and polypropylene, polyalkylene glycols such as poly(ethylene glycol) (PEG), polyethylenimine (PEI), polyalkylene oxides (PEO), polyalkylene terephthalates such as poly(ethylene terephthalate), polyvinyl alcohols (PVA), polyvinyl ethers, polyvinyl esters such as poly(vinyl acetate), polyvinyl halides such as poly(vinyl chloride) (PVC), polyvinylpyrrolidone, polysiloxanes, polystyrene (PS), polyurethanes, derivatized celluloses such as alkyl celluloses, hydroxyalkyl celluloses, cellulose ethers, cellulose esters, nitro celluloses, hydroxypropylcellulose, carboxymethylcellulose, polymers of acrylic acids, such as poly(methyl(meth)acrylate) (PMMA), poly(ethyl(meth)acrylate), poly(butyl(meth)acrylate), poly(isobutyl(meth)acrylate), poly(hexyl(meth)acrylate), poly(isodecyl(meth)acrylate), poly(lauryl(meth)acrylate), poly(phenyl(meth)acrylate), poly(methyl acrylate), poly(isopropyl acrylate), poly(isobutyl acrylate), poly(octadecyl acrylate) and copolymers and mixtures thereof, polydioxanone and its copolymers, polyhydroxyalkanoates, polypropylene fumarate, polyoxymethylene, poloxamers, poly(ortho)esters, poly(butyric acid), poly(valeric acid), poly(lactide-co-caprolactone), and trimethylene carbonate, polyvinylpyrrolidone.

[0096] In some cases, the nanoparticle is a lipid nanoparticle. A lipid nanoparticle can include one or more lipids, and one or more of the polymers listed above.

[0097] In some cases, the nanoparticle in a complex of the present disclosure is a colloidal metal nanoparticle. A colloidal metal includes any water-insoluble metal particle or metallic compound dispersed in liquid water. A colloid metal can be a suspension of metal particles in aqueous solution. Any metal that can be made in colloidal form can be used, including gold, silver, copper, nickel, aluminum, zinc, calcium, platinum, palladium, and iron. In some cases, gold nanoparticles are used, e.g., prepared from HAuCl₄. In some cases, the nanoparticles are non-gold nanoparticles that are coated with gold to make gold-coated nanoparticles.

[0098] In some cases, the nanoparticle is selected from the group consisting of a gold nanoparticle, a silver nanoparticle, a platinum nanoparticle, an aluminum nanoparticle, a palladium nanoparticle, a copper nanoparticle, a cobalt nanoparticle, an indium nanoparticle, and a nickel nanoparticle.

[0099] Methods for making colloidal metal nanoparticles, including gold colloidal nanoparticles from HAuCl₄, are known to those having ordinary skill in the art. For example, the methods described herein as well as those described elsewhere (e.g., US 2001/005581; 2003/0118657; and 2003/0053983) can be used to make nanoparticles.

[0100] Further aspects of the present disclosure include a nanoparticle, e.g., gold nanoparticle, conjugated to a nucleic acid. The nucleic acid can be conjugated covalently or noncovalently to the surface of the nanoparticle. For example, a nucleic acid may be covalently bonded at one end of the nucleic acid to the surface of the nanoparticle.

### Nucleic Acid Linked to a Nanoparticle

[0101] The nucleic acid that is conjugated to the nanoparticle may be single stranded, double stranded, or may have mix of single stranded and double stranded regions.

[0102] A nucleic acid can be conjugated directly or indirectly to a nanoparticle surface. For example, a nucleic acid can be conjugated directly to the surface of a nanoparticle or indirectly through an intervening linker. Any type of molecule can be used as a linker. For example, a linker can be an aliphatic chain including at least two carbon atoms (e.g., 3, 4, 5, 6, 7, 8, 9, 10 or more carbon atoms), and can be substituted with one or more functional groups including ketone, ether, ester, amide, alcohol, amine, urea, thiourea, sulfoxide, sulfone, sulfonamide, and disulfide functionalities. In cases where the nanoparticle includes gold, a linker can be any thiol-containing molecule. Reaction of a thiol group with the gold results in a covalent sulfide (—S—) bond. Linker design and synthesis are well known in the art.

[0103] The nucleic acid conjugated to the nanoparticle can have a length of from 10 nucleotides (nt) to 1000 nt, e.g., from about 1 nt to about 25 nt, from about 25 nt to about 50 nt, from about 50 nt to about 100 nt, from about 100 nt to about 250 nt, from about 250 nt to about 500 nt, or from about 500 nt to about 1000 nt. The nucleic acid conjugated to the nanoparticle can have a length of greater than 1000 nt. In some cases, the nucleic acid conjugated to the nanoparticle does not encode any protein or any other gene product. Instead, in some cases, the nucleic acid conjugated to the nanoparticle serves to non-covalently bind the Type II or Type V CRISPR system (where the Type II CRISPR system comprises a Cas9 polypeptide and a guide RNA; or where the Type II CRISPR system comprises a Cas9 polypeptide, a guide RNA, and a donor polynucleotide; where the Type V CRISPR system comprises a Cpf1 polypeptide and a guide RNA; or where the Type V CRISPR system comprises a Cpf1 polypeptide, a guide RNA and a donor DNA template) to the nanoparticle-nucleic acid conjugate. In some cases, the nucleic acid conjugated to the nanoparticle comprises one or more protospacer adjacent motif (PAM) sequences, e.g., a GG sequence or any other PAM sequence known in the art.

[0104] The nucleic acid conjugated to the nanoparticle (e.g., a colloidal metal (e.g., gold) nanoparticle; a nanoparticle comprising a biocompatible polymer) can have a length of from 10 nucleotides (nt) to 1000 nt, e.g., from about 1 nt to about 25 nt, from about 25 nt to about 50 nt, from about 50 nt to about 100 nt, from about 100 nt to about 250 nt, from about 250 nt to about 500 nt, or from about 500 nt to about 1000 nt. The nucleic acid conjugated to the nanoparticle (e.g., a colloidal metal (e.g., gold) nanoparticle; a nanoparticle comprising a biocompatible polymer) nanoparticle can have a length of greater than 1000 nt. In some cases, the nucleic acid conjugated to the nanoparticle (e.g., a colloidal metal (e.g., gold) nanoparticle) does not encode any protein or any other gene product. Instead, the nucleic acid conjugated to the nanoparticle (e.g., a colloidal metal (e.g., gold) nanoparticle) serves to non-covalently bind the Type II CRISPR system or Type V CRISPR system (where the Type II CRISPR system comprises a Cas9 polypeptide and a guide RNA; or where the Type II CRISPR system comprises a Cas9 polypeptide, a guide RNA, and a donor polynucleotide; where the Type V CRISPR system comprises a Cpf1 polypeptide and a guide RNA; or where the Type V CRISPR system comprises a Cpf1 polypeptide, a guide RNA, and a donor polynucleotide) to the nanoparticle-nucleic acid conjugate. In some cases, the nucleic acid conjugated to the nanoparticle (e.g., a colloidal metal (e.g., gold) nanoparticle; a nanoparticle comprising a biocompatible polymer) comprises one or more protospacer adjacent motif (PAM) sequences, e.g., a GG sequence or any other PAM sequence known in the art.

[0105] In some cases, a nucleic acid linked (e.g., covalently linked; non-covalently linked) to a nanoparticle comprises a nucleotide sequence that hybridizes to at least a portion of the guide RNA present in a complex of the present disclosure. In some cases, a nucleic acid linked to a nanoparticle in a complex of the present disclosure has at least 50%, at least 60%, at least 70%, at least 80%, at least 90%, at least 95%, at least 98%, at least 99%, or 100%, nucleotide sequence identity to a complement of from 10 to 50 nucleotides (e.g., from 10 nucleotides (nt) to 15 nt, from 15 nt to 20 nt, from 20 nt to 25 nt, from 25 nt to 30 nt, from 30 nt to 40 nt, or from 40 nt to 50 nt) of a guide RNA present in the complex.

[0106] In some cases, a nucleic acid linked (e.g., covalently linked; non-covalently linked) to a nanoparticle is a donor DNA template, or has the same or substantially the same nucleotide sequence as a donor DNA template. The term “donor DNA template” is also referred to herein as “donor sequence” or “donor polynucleotide” or “donor nucleic acid.”

[0107] In some cases, a nucleic acid linked (e.g., covalently linked; non-covalently linked) to a nanoparticle comprises a nucleotide sequence that is complementary to a donor DNA template.

[0108] By a “donor sequence” or “donor polynucleotide” it is meant a nucleic acid sequence to be inserted at the cleavage site induced by a site-directed modifying polypeptide (e.g., a Cas9 polypeptide; a Cpf1 polypeptide). The donor polynucleotide will contain sufficient homology to a genomic sequence at the cleavage site, e.g. 70%, 80%, 85%, 90%, 95%, or 100% homology with the nucleotide sequences flanking the cleavage site, e.g. within about 50 bases or less of the cleavage site, e.g. within about 30 bases, within about 15 bases, within about 10 bases, within about 5 bases, or immediately flanking the cleavage site, to support homology-directed repair between it and the genomic sequence to which it bears homology. Approximately 25, 50, 100, or 200 nucleotides, or more than 200 nucleotides, of sequence homology between a donor and a genomic sequence (or any integral value between 10 and 200 nucleotides, or more) will support homology-directed repair. Donor sequences can be of any length, e.g. 10 nucleotides or more, 50 nucleotides or more, 100 nucleotides or more, 250 nucleotides or more, 500 nucleotides or more, 1000 nucleotides or more, 5000 nucleotides or more, etc.

[0109] The donor sequence is typically not identical to a target genomic sequence. Rather, the donor sequence may contain one, or more than one, single base changes, insertions, deletions, inversions or rearrangements with respect to the genomic sequence, so long as sufficient homology is present to support homology-directed repair. In some embodiments, the donor sequence comprises a non-homologous sequence flanked by two regions of homology, such that homology-directed repair between the target DNA region and the two flanking sequences results in insertion of the non-homologous sequence at the target region. Donor sequences may also comprise a vector backbone containing sequences that are not homologous to the DNA region of interest and that are not intended for insertion into the DNA region of interest. Generally, the homologous region(s) of a donor sequence will have at least 50% sequence identity to a genomic sequence with which recombination is desired. In certain embodiments, 60%, 70%, 80%, 90%, 95%, 98%, 99%, or 99.9% sequence identity is present. Any value between 1% and 100% sequence identity can be present, depending upon the length of the donor polynucleotide.

[0110] The donor sequence may be a single-stranded DNA, a single-stranded RNA, a double-stranded DNA, or a double-stranded RNA. In some cases, the end of the donor sequence not attached to the nanoparticle may be protected (e.g., from exonucleolytic degradation) by methods known to those of skill in the art. For example, one or more dideoxynucleotide residues are added to the 3′ terminus of a linear molecule and/or self-complementary oligonucleotides are ligated to one or both ends. See, for example, Chang et al. (1987) Proc. Natl. Acad Sci USA 84:4959-4963; Nehls et al. (1996) Science 272:886-889. Additional methods for protecting exogenous polynucleotides from degradation include, but are not limited to, addition of terminal amino group(s) and the use of modified internucleotide linkages such as, for example, phosphorothioates, phosphoramidates, and O-methyl ribose or deoxyribose residues.

### Cas9 Polypeptides

[0111] A Cas9 polypeptide that is suitable for inclusion in a complex (e.g., an encapsulated complex) of the present disclosure can be an enzymatically active Cas9 polypeptide, e.g., can make single- or double-stranded breaks in a target nucleic acid. A Cas9 polypeptide that is suitable for inclusion in a complex of the present disclosure can have reduced enzymatic activity compared to a wild-type Cas9 polypeptide, e.g., compared to a Cas9 polypeptide comprises an amino acid sequence set forth in SEQ ID NO:5.

[0112] Suitable Cas9 polypeptides for inclusion in a complex of the present disclosure include a naturally-occurring Cas9 polypeptide (e.g., naturally occurs in bacterial and/or archaeal cells), or a non-naturally-occurring Cas9 polypeptide (e.g., the Cas9 polypeptide is a variant Cas9 polypeptide, a chimeric polypeptide as discussed below, and the like), as described below.

[0113] Exemplary Cas9 polypeptides are set forth in SEQ ID NOs: 5-826 as a non-limiting and non-exhaustive list. Naturally occurring Cas9 polypeptides bind a guide nucleic acid, are thereby directed to a specific sequence within a target nucleic acid (a target site), and cleave the target nucleic acid (e.g., cleave dsDNA to generate a double strand break, cleave ssDNA, cleave ssRNA, etc.). A subject Cas9 polypeptide comprises two portions, an RNA-binding portion and an activity portion. An RNA-binding portion interacts with a subject guide nucleic acid. An activity portion exhibits site-directed enzymatic activity (e.g., nuclease activity, activity for DNA and/or RNA methylation, activity for DNA and/or RNA cleavage, activity for histone acetylation, activity for histone methylation, activity for RNA modification, activity for RNA-binding, activity for RNA splicing etc.). In some cases the activity portion exhibits reduced nuclease activity relative to the corresponding portion of a wild type Cas9 polypeptide. In some cases, the activity portion is enzymatically inactive.

[0114] Assays to determine whether a protein has an RNA-binding portion interacts with a subject guide nucleic acid can be any convenient binding assay that tests for binding between a protein and a nucleic acid. Exemplary binding assays include binding assays (e.g., gel shift assays) that involve adding a guide nucleic acid and a Cas9 polypeptide to a target nucleic acid.

[0115] Assays to determine whether a protein has an activity portion (e.g., to determine if the polypeptide has nuclease activity that cleave a target nucleic acid) can be any convenient nucleic acid cleavage assay that tests for nucleic acid cleavage. Exemplary cleavage assays that include adding a guide nucleic acid and a Cas9 polypeptide to a target nucleic acid.

[0116] In some cases, a suitable Cas9 polypeptide for inclusion in a complex of the present disclosure has enzymatic activity that modifies target nucleic acid (e.g., nuclease activity, methyltransferase activity, demethylase activity, DNA repair activity, DNA damage activity, deamination activity, dismutase activity, alkylation activity, depurination activity, oxidation activity, pyrimidine dimer forming activity, integrase activity, transposase activity, recombinase activity, polymerase activity, ligase activity, helicase activity, photolyase activity or glycosylase activity).

[0117] In other cases, a suitable Cas9 polypeptide for inclusion in a complex of the present disclosure has enzymatic activity that modifies a polypeptide (e.g., a histone) associated with target nucleic acid (e.g., methyltransferase activity, demethylase activity, acetyltransferase activity, deacetylase activity, kinase activity, phosphatase activity, ubiquitin ligase activity, deubiquitinating activity, adenylation activity, deadenylation activity, SUMOylating activity, deSUMOylating activity, ribosylation activity, deribosylation activity, myristoylation activity or demyristoylation activity).

[0118] Many Cas9 orthologues from a wide variety of species have been identified and in some cases, the proteins share only a few identical amino acids. All identified Cas9 orthologues have the same domain architecture with a central HNH endonuclease domain and a split RuvC/RNaseH domain Cas9 proteins share 4 key motifs with a conserved architecture. Motifs 1, 2, and 4 are RuvC like motifs while motif 3 is an HNH-motif. In some cases, a suitable Cas9 polypeptide comprises an amino acid sequence having 4 motifs, each of motifs 1-4 having 60% or more, 70% or more, 75% or more, 80% or more, 85% or more, 90% or more, 95% or more, 99% or more or 100% amino acid sequence identity to motifs 1-4 of the Cas9 amino acid sequence depicted in FIG. 6A (SEQ ID NO:5) (motifs 1-4 of SEQ ID NO:5 are SEQ ID NOs:1-4, respectively, as depicted in Table 1), or to the corresponding portions in any of the amino acid sequences set forth in SEQ ID NOs:6-826 (see FIG. 7 for an alignment of motifs 1-4 from divergent Cas9 sequences).

[0119] In some cases, a suitable Cas9 polypeptide comprises an amino acid sequence having 60% or more, 70% or more, 75% or more, 80% or more, 85% or more, 90% or more, 95% or more, 99% or more or 100% amino acid sequence identity to one of the following amino acid sequences: (Streptococcus pyogenes (SEQ ID NO:5), Legionella pneumophila (SEQ ID NO:32), Gamma proteobacterium (SEQ ID NO:122), Listeria innocua (SEQ ID NO:19), Lactobacillus gasseri (SEQ ID NO:167), Eubacterium rectale (SEQ ID NO:114), Staphylococcus lugdunensis (SEQ ID NO:200), Mycoplasma synoviae (SEQ ID NO:37), Mycoplasma mobile (SEQ ID NO:31), Wolinella succinogenes (SEQ ID NO:25), Flavobacterium columnare (SEQ ID NO:250), Fibrobacter succinogenes (SEQ ID NO:136), Bacteroides fragilis (SEQ ID NO:36), Acidothermus cellulolyticus (SEQ ID NO:57), and Bifidobacterium dentium (SEQ ID NO:146).

[0120] In some cases, a suitable Cas9 polypeptide comprises an amino acid sequence having 4 motifs, each of motifs 1-4 having 60% or more amino acid sequence identity to motifs 1-4 of the Cas9 amino acid sequence depicted in FIG. 6A (SEQ ID NO:5) (motifs 1-4 of SEQ ID NO:5 are SEQ ID NOs:1-4, respectively, as depicted in Table 1), or to the corresponding portions in any of the amino acid sequences set forth in SEQ ID NOs:6-826 (see FIG. 7 for an alignment of motifs 1-4 from divergent Cas9 sequences).

[0121] In some cases, a suitable Cas9 polypeptide comprises an amino acid sequence having 4 motifs, each of motifs 1-4 having 70% or more amino acid sequence identity to motifs 1-4 of the Cas9 amino acid sequence depicted in FIG. 6A (SEQ ID NO:5) (motifs 1-4 of SEQ ID NO:5 are SEQ ID NOs:1-4, respectively, as depicted in Table 1), or to the corresponding portions in any of the amino acid sequences set forth in SEQ ID NOs:6-826 (see FIG. 7 for an alignment of motifs 1-4 from divergent Cas9 sequences).

[0122] In some cases, a suitable Cas9 polypeptide comprises an amino acid sequence having 4 motifs, each of motifs 1-4 having 75% or more amino acid sequence identity to motifs 1-4 of the Cas9 amino acid sequence depicted in FIG. 6A (SEQ ID NO:5) (motifs 1-4 of SEQ ID NO:5 are SEQ ID NOs:1-4, respectively, as depicted in Table 1), or to the corresponding portions in any of the amino acid sequences set forth in SEQ ID NOs:6-826 (see FIG. 7 for an alignment of motifs 1-4 from divergent Cas9 sequences).

[0123] In some cases, a suitable Cas9 polypeptide comprises an amino acid sequence having 4 motifs, each of motifs 1-4 having 80% or more amino acid sequence identity to motifs 1-4 of the Cas9 amino acid sequence depicted in FIG. 6A (SEQ ID NO:5) (motifs 1-4 of SEQ ID NO:5 are SEQ ID NOs:1-4, respectively, as depicted in Table 1), or to the corresponding portions in any of the amino acid sequences set forth in SEQ ID NOs:6-826 (see FIG. 7 for an alignment of motifs 1-4 from divergent Cas9 sequences).

[0124] In some cases, a suitable Cas9 polypeptide comprises an amino acid sequence having 4 motifs, each of motifs 1-4 having 85% or more amino acid sequence identity to motifs 1-4 of the Cas9 amino acid sequence depicted in FIG. 6A (SEQ ID NO:5) (motifs 1-4 of SEQ ID NO:5 are SEQ ID NOs:1-4, respectively, as depicted in Table 1), or to the corresponding portions in any of the amino acid sequences set forth in SEQ ID NOs:6-826 (see FIG. 7 for an alignment of motifs 1-4 from divergent Cas9 sequences).

[0125] In some cases, a suitable Cas9 polypeptide comprises an amino acid sequence having 4 motifs, each of motifs 1-4 having 90% or more amino acid sequence identity to motifs 1-4 of the Cas9 amino acid sequence depicted in FIG. 6A (SEQ ID NO:5) (motifs 1-4 of SEQ ID NO:5 are SEQ ID NOs:1-4, respectively, as depicted in Table 1), or to the corresponding portions in any of the amino acid sequences set forth in SEQ ID NOs:6-826 (see FIG. 7 for an alignment of motifs 1-4 from divergent Cas9 sequences).

[0126] In some cases, a suitable Cas9 polypeptide comprises an amino acid sequence having 4 motifs, each of motifs 1-4 having 95% or more amino acid sequence identity to motifs 1-4 of the Cas9 amino acid sequence depicted in FIG. 6A (SEQ ID NO:5) (motifs 1-4 of SEQ ID NO:5 are SEQ ID NOs:1-4, respectively, as depicted in Table 1), or to the corresponding portions in any of the amino acid sequences set forth in SEQ ID NOs:6-826 (see FIG. 7 for an alignment of motifs 1-4 from divergent Cas9 sequences).

[0127] In some cases, a suitable Cas9 polypeptide comprises an amino acid sequence having 4 motifs, each of motifs 1-4 having 99% or more amino acid sequence identity to motifs 1-4 of the Cas9 amino acid sequence depicted in FIG. 6A (SEQ ID NO:5) (motifs 1-4 of SEQ ID NO:5 are SEQ ID NOs:1-4, respectively, as depicted in Table 1), or to the corresponding portions in any of the amino acid sequences set forth in SEQ ID NOs:6-826 (see FIG. 7 for an alignment of motifs 1-4 from divergent Cas9 sequences).

[0128] In some cases, a suitable Cas9 polypeptide comprises an amino acid sequence having 4 motifs, each of motifs 1-4 having 100% amino acid sequence identity to motifs 1-4 of the Cas9 amino acid sequence depicted in FIG. 6A (SEQ ID NO:5) (motifs 1-4 of SEQ ID NO:5 are SEQ ID NOs:1-4, respectively, as depicted in Table 1), or to the corresponding portions in any of the amino acid sequences set forth in SEQ ID NOs:6-826 (see FIG. 7 for an alignment of motifs 1-4 from divergent Cas9 sequences).

[0129] In some cases, a suitable Cas9 polypeptide comprises an amino acid sequence having 60% or more, 70% or more, 75% or more, 80% or more, 85% or more, 90% or more, 95% or more, 99% or more or 100% amino acid sequence identity to amino acids 7-166 or 731-1003 of the Cas9 amino acid sequence depicted in FIG. 6A (SEQ ID NO:5), or to the corresponding portions in any of the amino acid sequences set forth as SEQ ID NOs:6-826. Any Cas9 protein as defined above can be used as a Cas9 polypeptide, or as part of a chimeric Cas9 polypeptide, in a complex of the present disclosure.

[0130] In some cases, a suitable Cas9 polypeptide comprises an amino acid sequence having 60% or more amino acid sequence identity to amino acids 7-166 or 731-1003 of the Cas9 amino acid sequence depicted in FIG. 6A (SEQ ID NO:5), or to the corresponding portions in any of the amino acid sequences set forth as SEQ ID NOs:6-826. Any Cas9 protein as defined above can be used as a Cas9 polypeptide, or as part of a chimeric Cas9 polypeptide, in a complex of the present disclosure.

[0131] In some cases, a suitable Cas9 polypeptide comprises an amino acid sequence having 70% or more amino acid sequence identity to amino acids 7-166 or 731-1003 of the Cas9 amino acid sequence depicted in FIG. 6A (SEQ ID NO:5), or to the corresponding portions in any of the amino acid sequences set forth as SEQ ID NOs:6-826. Any Cas9 protein as defined above can be used as a Cas9 polypeptide, or as part of a chimeric Cas9 polypeptide, in a complex of the present disclosure.

[0132] In some cases, a suitable Cas9 polypeptide comprises an amino acid sequence having 75% or more amino acid sequence identity to amino acids 7-166 or 731-1003 of the Cas9 amino acid sequence depicted in FIG. 6A (SEQ ID NO:5), or to the corresponding portions in any of the amino acid sequences set forth as SEQ ID NOs:6-826. Any Cas9 protein as defined above can be used as a Cas9 polypeptide, or as part of a chimeric Cas9 polypeptide, in a complex of the present disclosure.

[0133] In some cases, a suitable Cas9 polypeptide comprises an amino acid sequence having 80% or more amino acid sequence identity to amino acids 7-166 or 731-1003 of the Cas9 amino acid sequence depicted in FIG. 6A (SEQ ID NO:5), or to the corresponding portions in any of the amino acid sequences set forth as SEQ ID NOs:6-826. Any Cas9 protein as defined above can be used as a Cas9 polypeptide, or as part of a chimeric Cas9 polypeptide, in a complex of the present disclosure.

[0134] In some cases, a suitable Cas9 polypeptide comprises an amino acid sequence having 85% or more amino acid sequence identity to amino acids 7-166 or 731-1003 of the Cas9 amino acid sequence depicted in FIG. 6A (SEQ ID NO:5), or to the corresponding portions in any of the amino acid sequences set forth as SEQ ID NOs:6-826. Any Cas9 protein as defined above can be used as a Cas9 polypeptide, or as part of a chimeric Cas9 polypeptide, in a complex of the present disclosure.

[0135] In some cases, a suitable Cas9 polypeptide comprises an amino acid sequence having 90% or more amino acid sequence identity to amino acids 7-166 or 731-1003 of the Cas9 amino acid sequence depicted in FIG. 6A (SEQ ID NO:5), or to the corresponding portions in any of the amino acid sequences set forth as SEQ ID NOs:6-826. Any Cas9 protein as defined above can be used as a Cas9 polypeptide, or as part of a chimeric Cas9 polypeptide, in a complex of the present disclosure.

[0136] In some cases, a suitable Cas9 polypeptide comprises an amino acid sequence having 95% or more amino acid sequence identity to amino acids 7-166 or 731-1003 of the Cas9 amino acid sequence depicted in FIG. 6A (SEQ ID NO:5), or to the corresponding portions in any of the amino acid sequences set forth as SEQ ID NOs:6-826. Any Cas9 protein as defined above can be used as a Cas9 polypeptide, or as part of a chimeric Cas9 polypeptide, in a complex of the present disclosure.

[0137] In some cases, a suitable Cas9 polypeptide comprises an amino acid sequence having 99% or more amino acid sequence identity to amino acids 7-166 or 731-1003 of the Cas9 amino acid sequence depicted in FIG. 6A (SEQ ID NO:5), or to the corresponding portions in any of the amino acid sequences set forth as SEQ ID NOs:6-826. Any Cas9 protein as defined above can be used as a Cas9 polypeptide, or as part of a chimeric Cas9 polypeptide, in a complex of the present disclosure.

[0138] In some cases, a suitable Cas9 polypeptide comprises an amino acid sequence having 100% amino acid sequence identity to amino acids 7-166 or 731-1003 of the Cas9 amino acid sequence depicted in FIG. 6A (SEQ ID NO:5), or to the corresponding portions in any of the amino acid sequences set forth as SEQ ID NOs:6-826. Any Cas9 protein as defined above can be used as a Cas9 polypeptide, or as part of a chimeric Cas9 polypeptide, in a complex of the present disclosure.

[0139] In some cases, a suitable Cas9 polypeptide comprises an amino acid sequence having 60% or more, 70% or more, 75% or more, 80% or more, 85% or more, 90% or more, 95% or more, 99% or more or 100% amino acid sequence identity to the Cas9 amino acid sequence depicted in FIG. 6A (SEQ ID NO:5), or to any of the amino acid sequences set forth as SEQ ID NOs:6-826. Any Cas9 protein as defined above can be used as a Cas9 polypeptide, or as part of a chimeric Cas9 polypeptide, in a complex of the present disclosure.

[0140] In some cases, a suitable Cas9 polypeptide comprises an amino acid sequence having 60% or more amino acid sequence identity to the Cas9 amino acid sequence depicted in FIG. 6A (SEQ ID NO:5), or to any of the amino acid sequences set forth as SEQ ID NOs:6-826. Any Cas9 protein as defined above can be used as a Cas9 polypeptide, or as part of a chimeric Cas9 polypeptide, in a complex of the present disclosure.

[0141] In some cases, a suitable Cas9 polypeptide comprises an amino acid sequence having 70% or more amino acid sequence identity to the Cas9 amino acid sequence depicted in FIG. 6A (SEQ ID NO:5), or to any of the amino acid sequences set forth as SEQ ID NOs:6-826. Any Cas9 protein as defined above can be used as a Cas9 polypeptide, or as part of a chimeric Cas9 polypeptide, in a complex of the present disclosure.

[0142] In some cases, a suitable Cas9 polypeptide comprises an amino acid sequence having 75% or more amino acid sequence identity to the Cas9 amino acid sequence depicted in FIG. 6A (SEQ ID NO:5), or to any of the amino acid sequences set forth as SEQ ID NOs:6-826. Any Cas9 protein as defined above can be used as a Cas9 polypeptide, or as part of a chimeric Cas9 polypeptide, in a complex of the present disclosure.

[0143] In some cases, a suitable Cas9 polypeptide comprises an amino acid sequence having 80% or more amino acid sequence identity to the Cas9 amino acid sequence depicted in FIG. 6A (SEQ ID NO:5), or to any of the amino acid sequences set forth as SEQ ID NOs:6-826. Any Cas9 protein as defined above can be used as a Cas9 polypeptide, or as part of a chimeric Cas9 polypeptide, in a complex of the present disclosure.

[0144] In some cases, a suitable Cas9 polypeptide comprises an amino acid sequence having 85% or more amino acid sequence identity to the Cas9 amino acid sequence depicted in FIG. 6A (SEQ ID NO:5), or to any of the amino acid sequences set forth as SEQ ID NOs:6-826. Any Cas9 protein as defined above can be used as a Cas9 polypeptide, or as part of a chimeric Cas9 polypeptide, in a complex of the present disclosure.

[0145] In some cases, a suitable Cas9 polypeptide comprises an amino acid sequence having 90% or more amino acid sequence identity to the Cas9 amino acid sequence depicted in FIG. 6A (SEQ ID NO:5), or to any of the amino acid sequences set forth as SEQ ID NOs:6-826. Any Cas9 protein as defined above can be used as a Cas9 polypeptide, or as part of a chimeric Cas9 polypeptide, in a complex of the present disclosure.

[0146] In some cases, a suitable Cas9 polypeptide comprises an amino acid sequence having 95% or more amino acid sequence identity to the Cas9 amino acid sequence depicted in FIG. 6A (SEQ ID NO:5), or to any of the amino acid sequences set forth as SEQ ID NOs:6-826. Any Cas9 protein as defined above can be used as a Cas9 polypeptide, or as part of a chimeric Cas9 polypeptide, in a complex of the present disclosure.

[0147] In some cases, a suitable Cas9 polypeptide comprises an amino acid sequence having 99% or more amino acid sequence identity to the Cas9 amino acid sequence depicted in FIG. 6A (SEQ ID NO:5), or to any of the amino acid sequences set forth as SEQ ID NOs:6-826. Any Cas9 protein as defined above can be used as a Cas9 polypeptide, or as part of a chimeric Cas9 polypeptide, in a complex of the present disclosure.

[0148] In some cases, a suitable Cas9 polypeptide comprises an amino acid sequence having 100% amino acid sequence identity to the Cas9 amino acid sequence depicted in FIG. 6A (SEQ ID NO:5), or to any of the amino acid sequences set forth as SEQ ID NOs:6-826. Any Cas9 protein as defined above can be used as a Cas9 polypeptide, or as part of a chimeric Cas9 polypeptide, in a complex of the present disclosure.

[0149] In some cases, a Cas9 polypeptide comprises 4 motifs (as listed in Table 1 and depicted in FIG. 6A and FIG. 7), at least one with (or each with) amino acid sequences having 75% or more, 80% or more, 85% or more, 90% or more, 95% or more, 99% or more or 100% amino acid sequence identity to each of the 4 motifs listed in Table 1(SEQ ID NOs:1-4), or to the corresponding portions in any of the amino acid sequences set forth as SEQ ID NOs:6-826.

[0150] In some cases, a Cas9 polypeptide comprises an amino acid sequence having 75% or more, 80% or more, 85% or more, 90% or more, 95% or more, or 98%, amino acid sequence identity to the amino acid sequence depicted in FIG. 6A and set forth in SEQ ID NO:5; and has amino acid substitutions of N497, R661, Q695, and Q926 relative to the amino acid sequence set forth in SEQ ID NO:5. In some cases, a Cas9 polypeptide comprises an amino acid sequence having 75% or more, 80% or more, 85% or more, 90% or more, 95% or more, or 98%, amino acid sequence identity to the amino acid sequence depicted in FIG. 6A and set forth in SEQ ID NO:5; and has amino acid substitutions N497A, R661A, Q695A, and Q926A relative to the amino acid sequence set forth in SEQ ID NO:5.

[0151] In some cases, a Cas9 polypeptide comprises an amino acid sequence having 75% or more, 80% or more, 85% or more, 90% or more, 95% or more, or 98%, amino acid sequence identity to the amino acid sequence depicted in FIG. 6A and set forth in SEQ ID NO:5; and has an amino acid substitution of K855 relative to the amino acid sequence set forth in SEQ ID NO:5. In some cases, a Cas9 polypeptide comprises an amino acid sequence having 75% or more, 80% or more, 85% or more, 90% or more, 95% or more, or 98%, amino acid sequence identity to the amino acid sequence depicted in FIG. 6A and set forth in SEQ ID NO:5; and has the amino acid substitution K855A relative to the amino acid sequence set forth in SEQ ID NO:5.

[0152] In some cases, a Cas9 polypeptide comprises an amino acid sequence having 75% or more, 80% or more, 85% or more, 90% or more, 95% or more, or 98%, amino acid sequence identity to the amino acid sequence depicted in FIG. 6A and set forth in SEQ ID NO:5; and has amino acid substitutions of K810, K1003, and R1060 relative to the amino acid sequence set forth in SEQ ID NO:5. In some cases, a Cas9 polypeptide comprises an amino acid sequence having 75% or more, 80% or more, 85% or more, 90% or more, 95% or more, or 98%, amino acid sequence identity to the amino acid sequence depicted in FIG. 6A and set forth in SEQ ID NO:5; and has amino acid substitutions K810A, K1003A, and R1060A relative to the amino acid sequence set forth in SEQ ID NO:5.

[0153] In some cases, a Cas9 polypeptide comprises an amino acid sequence having 75% or more, 80% or more, 85% or more, 90% or more, 95% or more, or 98%, amino acid sequence identity to the amino acid sequence depicted in FIG. 6A and set forth in SEQ ID NO:5; and has amino acid substitutions of K848, K1003, and R1060 relative to the amino acid sequence set forth in SEQ ID NO:5. In some cases, a Cas9 polypeptide comprises an amino acid sequence having 75% or more, 80% or more, 85% or more, 90% or more, 95% or more, or 98%, amino acid sequence identity to the amino acid sequence depicted in FIG. 6A and set forth in SEQ ID NO:5; and has amino acid substitutions K848A, K1003A, and R1060A relative to the amino acid sequence set forth in SEQ ID NO:5.

[0154] As used herein, the term “Cas9 polypeptide” encompasses the term “variant Cas9 polypeptide”; and the term “variant Cas9 polypeptide” encompasses the term “chimeric Cas9 polypeptide.”

### Variant Cas9 Polypeptides

[0155] A suitable Cas9 polypeptide for inclusion in a complex of the present disclosure includes a variant Cas9 polypeptide. A variant Cas9 polypeptide has an amino acid sequence that is different by one amino acid (e.g., has a deletion, insertion, substitution, fusion) (i.e., different by at least one amino acid) when compared to the amino acid sequence of a wild type Cas9 polypeptide (e.g., a naturally occurring Cas9 polypeptide, as described above). In some instances, the variant Cas9 polypeptide has an amino acid change (e.g., deletion, insertion, or substitution) that reduces the nuclease activity of the Cas9 polypeptide. For example, in some instances, the variant Cas9 polypeptide has less than 50%, less than 40%, less than 30%, less than 20%, less than 10%, less than 5%, or less than 1% of the nuclease activity of the corresponding wild-type Cas9 polypeptide. In some cases, the variant Cas9 polypeptide has no substantial nuclease activity. When a Cas9 polypeptide is a variant Cas9 polypeptide that has no substantial nuclease activity, it can be referred to as “dCas9.”

[0156] In some cases, a variant Cas9 polypeptide has reduced nuclease activity. For example, a variant Cas9 polypeptide suitable for use in a binding method of the present disclosure exhibits less than about 20%, less than about 15%, less than about 10%, less than about 5%, less than about 1%, or less than about 0.1%, of the endonuclease activity of a wild-type Cas9 polypeptide, e.g., a wild-type Cas9 polypeptide comprising an amino acid sequence as depicted in FIG. 6A (SEQ ID NO:5).

[0157] In some cases, a variant Cas9 polypeptide can cleave the complementary strand of a target nucleic acid but has reduced ability to cleave the non-complementary strand of a double stranded target nucleic acid. For example, the variant Cas9 polypeptide can have a mutation (amino acid substitution) that reduces the function of the RuvC domain (e.g., “domain 1” of FIG. 6A). As a non-limiting example, in some embodiments, a variant Cas9 polypeptide has a D10A mutation (e.g., aspartate to alanine at an amino acid position corresponding to position 10 of SEQ ID NO:5) (FIG. 6B) (e.g., or the corresponding mutation of any of the proteins presented in SEQ ID NOs:6-826) and can therefore cleave the complementary strand of a double stranded target nucleic acid but has reduced ability to cleave the non-complementary strand of a double stranded target nucleic acid (thus resulting in a single strand break (SSB) instead of a double strand break (DSB) when the variant Cas9 polypeptide cleaves a double stranded target nucleic acid) (see, for example, Jinek et al., Science. 2012 Aug. 17; 337(6096):816-21).

[0158] In some cases, a variant Cas9 polypeptide can cleave the non-complementary strand of a double stranded target nucleic acid but has reduced ability to cleave the complementary strand of the target nucleic acid. For example, the variant Cas9 polypeptide can have a mutation (amino acid substitution) that reduces the function of the HNH domain (RuvC/HNH/RuvC domain motifs, “domain 2” of FIG. 6A). As a non-limiting example, in some embodiments, the variant Cas9 polypeptide can have an H840A mutation (e.g., histidine to alanine at an amino acid position corresponding to position 840 of SEQ ID NO:5) (FIG. 6C) (or the corresponding mutation of any of the proteins set forth as SEQ ID NOs:6-826) and can therefore cleave the non-complementary strand of the target nucleic acid but has reduced ability to cleave the complementary strand of the target nucleic acid (thus resulting in a SSB instead of a DSB when the variant Cas9 polypeptide cleaves a double stranded target nucleic acid). Such a Cas9 polypeptide has a reduced ability to cleave a target nucleic acid (e.g., a single stranded target nucleic acid) but retains the ability to bind a target nucleic acid (e.g., a single-stranded or a double-stranded target nucleic acid).

[0159] In some cases, a variant Cas9 polypeptide has a reduced ability to cleave both the complementary and the non-complementary strands of a double stranded target nucleic acid. As a non-limiting example, in some cases, the variant Cas9 polypeptide harbors both the D10A and the H840A mutations (e.g., mutations in both the RuvC domain and the HNH domain) (FIG. 6D) (or the corresponding mutations of any of the proteins set forth as SEQ ID NOs:6-826) such that the polypeptide has a reduced ability to cleave both the complementary and the non-complementary strands of a double stranded target nucleic acid. Such a Cas9 polypeptide has a reduced ability to cleave a target nucleic acid (e.g., a single-stranded target nucleic acid or a double-stranded target nucleic acid) but retains the ability to bind a target nucleic acid (e.g., a single stranded target nucleic acid or a double-stranded target nucleic acid).

[0160] As another non-limiting example, in some cases, the variant Cas9 polypeptide harbors W476A and W1126A mutations (FIG. 6E) (or the corresponding mutations of any of the proteins set forth as SEQ ID NOs:5-826) such that the polypeptide has a reduced ability to cleave a target nucleic acid. Such a Cas9 polypeptide has a reduced ability to cleave a target nucleic acid but retains the ability to bind a target nucleic acid.

[0161] As another non-limiting example, in some cases, the variant Cas9 polypeptide harbors P475A, W476A, N477A, D1125A, W1126A, and D1127A mutations (FIG. 6F) (or the corresponding mutations of any of the proteins set forth as SEQ ID NOs:5-826) such that the polypeptide has a reduced ability to cleave a target nucleic acid. Such a Cas9 polypeptide has a reduced ability to cleave a target nucleic acid but retains the ability to bind a target nucleic acid.

[0162] As another non-limiting example, in some cases, the variant Cas9 polypeptide harbors H840A, W476A, and W1126A, mutations (FIG. 6G) (or the corresponding mutations of any of the proteins set forth as SEQ ID NOs:5-826) such that the polypeptide has a reduced ability to cleave a target nucleic acid. Such a Cas9 polypeptide has a reduced ability to cleave a target nucleic acid but retains the ability to bind a target nucleic acid.

[0163] As another non-limiting example, in some cases, the variant Cas9 polypeptide harbors H840A, D10A, W476A, and W1126A, mutations (FIG. 6H) (or the corresponding mutations of any of the proteins set forth as SEQ ID NOs:5-826) such that the polypeptide has a reduced ability to cleave a target nucleic acid. Such a Cas9 polypeptide has a reduced ability to cleave a target nucleic acid but retains the ability to bind a target nucleic acid.

[0164] As another non-limiting example, in some cases, the variant Cas9 polypeptide harbors, H840A, P475A, W476A, N477A, D1125A, W1126A, and D1127A mutations (FIG. 6I) (or the corresponding mutations of any of the proteins set forth as SEQ ID NOs:5-826) such that the polypeptide has a reduced ability to cleave a target nucleic acid. Such a Cas9 polypeptide has a reduced ability to cleave a target nucleic acid but retains the ability to bind a target nucleic acid.

[0165] As another non-limiting example, in some cases, the variant Cas9 polypeptide harbors D10A, H840A, P475A, W476A, N477A, D1125A, W1126A, and D1127A mutations (FIG. 6J) (or the corresponding mutations of any of the proteins set forth as SEQ ID NOs:5-826) such that the polypeptide has a reduced ability to cleave a target nucleic acid. Such a Cas9 polypeptide has a reduced ability to cleave a target nucleic acid but retains the ability to bind a target nucleic acid.

[0166] Other residues can be mutated to achieve the above effects (i.e. inactivate one or the other nuclease portions). As non-limiting examples, residues D10, G12, G17, E762, H840, N854, N863, H982, H983, A984, D986, and/or A987 (or the corresponding mutations of any of the proteins set forth as SEQ ID NOs:5-826) can be altered (i.e., substituted) (see Table 1 for more information regarding the conservation of Cas9 amino acid residues). Also, mutations other than alanine substitutions are suitable.

[0167] In some embodiments, a variant Cas9 polypeptide that has reduced catalytic activity (e.g., when a Cas9 protein has a D10, G12, G17, E762, H840, N854, N863, H982, H983, A984, D986, and/or a A987 mutation, e.g., D10A, G12A, G17A, E762A, H840A, N854A, N863A, H982A, H983A, A984A, and/or D986A), the variant Cas9 polypeptide can still bind to target nucleic acid in a site-specific manner (because it is still guided to a target nucleic acid sequence by a guide nucleic acid) as long as it retains the ability to interact with the guide nucleic acid.

TABLE 1
Table 1 lists 4 motifs that are present in Cas9 sequences from
various species (e.g., see alignments of FIG. 7). The amino acids
listed here are from the Cas9 from S. pyogenes (SEQ ID NO: 5).

| Motif | Motif | Amino acids (residue #s) | Highly conserved |
|---|---|---|---|
| 1 | RuvC | IGLDIGTNSVGWAVI (7-21) | D10, G12, G17 |
| | | (SEQ ID NO: 1) | |
| 2 | RuvC | IVIEMARE (759-766) | E762 |
| | | (SEQ ID NO: 2) | |
| 3 | HNH-motif | DVDHIVPQSFLKDDSIDNKVLTRSDKN | H840, N854, N863 |
| | | (837-863) (SEQ ID NO: 3) | |
| 4 | RuvC | HHAHDAYL (982-989) | H982, H983, A984, |
| | | (SEQ ID NO: 4) | D986, A987 |

[0168] In addition to the above, a variant Cas9 protein can have the same parameters for sequence identity as described above for Cas9 polypeptides. Thus, in some cases, a suitable variant Cas9 polypeptide comprises an amino acid sequence having 4 motifs, each of motifs 1-4 having 60% or more, 70% or more, 75% or more, 80% or more, 85% or more, 90% or more, 95% or more, 99% or more or 100% amino acid sequence identity to motifs 1-4 of the Cas9 amino acid sequence depicted in FIG. 6A (SEQ ID NO:5) (motifs 1-4 of SEQ ID NO:5 are SEQ ID NOs:1-4, respectively, as depicted in Table 1), or to the corresponding portions in any of the amino acid sequences set forth in SEQ ID NOs:6-826 (see FIG. 7 for an alignment of motifs 1-4 from divergent Cas9 sequences).

[0169] In some cases, a suitable variant Cas9 polypeptide comprises an amino acid sequence having 4 motifs, each of motifs 1-4 having 60% or more amino acid sequence identity to motifs 1-4 of the Cas9 amino acid sequence depicted in FIG. 6A (SEQ ID NO:5) (motifs 1-4 of SEQ ID NO:5 are SEQ ID NOs:1-4, respectively, as depicted in Table 1), or to the corresponding portions in any of the amino acid sequences set forth in SEQ ID NOs:6-826 (see FIG. 7 for an alignment of motifs 1-4 from divergent Cas9 sequences).

[0170] In some cases, a suitable variant Cas9 polypeptide comprises an amino acid sequence having 4 motifs, each of motifs 1-4 having 70% or more amino acid sequence identity to motifs 1-4 of the Cas9 amino acid sequence depicted in FIG. 6A (SEQ ID NO:5) (motifs 1-4 of SEQ ID NO:5 are SEQ ID NOs:1-4, respectively, as depicted in Table 1), or to the corresponding portions in any of the amino acid sequences set forth in SEQ ID NOs:6-826 (see FIG. 7 for an alignment of motifs 1-4 from divergent Cas9 sequences).

[0171] In some cases, a suitable variant Cas9 polypeptide comprises an amino acid sequence having 4 motifs, each of motifs 1-4 having 75% or more amino acid sequence identity to motifs 1-4 of the Cas9 amino acid sequence depicted in FIG. 6A (SEQ ID NO:5) (motifs 1-4 of SEQ ID NO:5 are SEQ ID NOs:1-4, respectively, as depicted in Table 1), or to the corresponding portions in any of the amino acid sequences set forth in SEQ ID NOs:6-826 (see FIG. 7 for an alignment of motifs 1-4 from divergent Cas9 sequences).

[0172] In some cases, a suitable variant Cas9 polypeptide comprises an amino acid sequence having 4 motifs, each of motifs 1-4 having 80% or more amino acid sequence identity to motifs 1-4 of the Cas9 amino acid sequence depicted in FIG. 6A (SEQ ID NO:5) (motifs 1-4 of SEQ ID NO:5 are SEQ ID NOs:1-4, respectively, as depicted in Table 1), or to the corresponding portions in any of the amino acid sequences set forth in SEQ ID NOs:6-826 (see FIG. 7 for an alignment of motifs 1-4 from divergent Cas9 sequences).

[0173] In some cases, a suitable variant Cas9 polypeptide comprises an amino acid sequence having 4 motifs, each of motifs 1-4 having 85% or more amino acid sequence identity to motifs 1-4 of the Cas9 amino acid sequence depicted in FIG. 6A (SEQ ID NO:5) (motifs 1-4 of SEQ ID NO:5 are SEQ ID NOs:1-4, respectively, as depicted in Table 1), or to the corresponding portions in any of the amino acid sequences set forth in SEQ ID NOs:6-826 (see FIG. 7 for an alignment of motifs 1-4 from divergent Cas9 sequences).

[0174] In some cases, a suitable variant Cas9 polypeptide comprises an amino acid sequence having 4 motifs, each of motifs 1-4 having 90% or more amino acid sequence identity to motifs 1-4 of the Cas9 amino acid sequence depicted in FIG. 6A (SEQ ID NO:5) (motifs 1-4 of SEQ ID NO:5 are SEQ ID NOs:1-4, respectively, as depicted in Table 1), or to the corresponding portions in any of the amino acid sequences set forth in SEQ ID NOs:6-826 (see FIG. 7 for an alignment of motifs 1-4 from divergent Cas9 sequences).

[0175] In some cases, a suitable variant Cas9 polypeptide comprises an amino acid sequence having 4 motifs, each of motifs 1-4 having 95% or more amino acid sequence identity to motifs 1-4 of the Cas9 amino acid sequence depicted in FIG. 6A (SEQ ID NO:5) (motifs 1-4 of SEQ ID NO:5 are SEQ ID NOs:1-4, respectively, as depicted in Table 1), or to the corresponding portions in any of the amino acid sequences set forth in SEQ ID NOs:6-826 (see FIG. 7 for an alignment of motifs 1-4 from divergent Cas9 sequences).

[0176] In some cases, a suitable variant Cas9 polypeptide comprises an amino acid sequence having 4 motifs, each of motifs 1-4 having 99% or more amino acid sequence identity to motifs 1-4 of the Cas9 amino acid sequence depicted in FIG. 6A (SEQ ID NO:5) (motifs 1-4 of SEQ ID NO:5 are SEQ ID NOs:1-4, respectively, as depicted in Table 1), or to the corresponding portions in any of the amino acid sequences set forth in SEQ ID NOs:6-826 (see FIG. 7 for an alignment of motifs 1-4 from divergent Cas9 sequences).

[0177] In some cases, a suitable variant Cas9 polypeptide comprises an amino acid sequence having 4 motifs, each of motifs 1-4 having 100% amino acid sequence identity to motifs 1-4 of the Cas9 amino acid sequence depicted in FIG. 6A (SEQ ID NO:5) (motifs 1-4 of SEQ ID NO:5 are SEQ ID NOs:1-4, respectively, as depicted in Table 1), or to the corresponding portions in any of the amino acid sequences set forth in SEQ ID NOs:6-826 (see FIG. 7 for an alignment of motifs 1-4 from divergent Cas9 sequences).

[0178] In some cases, a suitable variant Cas9 polypeptide comprises an amino acid sequence having 60% or more, 70% or more, 75% or more, 80% or more, 85% or more, 90% or more, 95% or more, 99% or more, or 100% amino acid sequence identity to amino acids 7-166 or 731-1003 of the Cas9 amino acid sequence depicted in FIG. 6A (SEQ ID NO:5), or to the corresponding portions in any of the amino acid sequences set forth as SEQ ID NOs:6-826. Any Cas9 protein as defined above can be used as a Cas9 polypeptide, or as part of a chimeric Cas9 polypeptide, in a complex of the present disclosure.

[0179] In some cases, a suitable variant Cas9 polypeptide comprises an amino acid sequence having 60% or more amino acid sequence identity to amino acids 7-166 or 731-1003 of the Cas9 amino acid sequence depicted in FIG. 6A (SEQ ID NO:5), or to the corresponding portions in any of the amino acid sequences set forth as SEQ ID NOs:6-826. Any Cas9 protein as defined above can be used as a Cas9 polypeptide, or as part of a chimeric Cas9 polypeptide, in a complex of the present disclosure.

[0180] In some cases, a suitable variant Cas9 polypeptide comprises an amino acid sequence having 70% or more amino acid sequence identity to amino acids 7-166 or 731-1003 of the Cas9 amino acid sequence depicted in FIG. 6A (SEQ ID NO:5), or to the corresponding portions in any of the amino acid sequences set forth as SEQ ID NOs:6-826. Any Cas9 protein as defined above can be used as a Cas9 polypeptide, or as part of a chimeric Cas9 polypeptide, in a complex of the present disclosure.

[0181] In some cases, a suitable variant Cas9 polypeptide comprises an amino acid sequence having 75% or more amino acid sequence identity to amino acids 7-166 or 731-1003 of the Cas9 amino acid sequence depicted in FIG. 6A (SEQ ID NO:5), or to the corresponding portions in any of the amino acid sequences set forth as SEQ ID NOs:6-826. Any Cas9 protein as defined above can be used as a Cas9 polypeptide, or as part of a chimeric Cas9 polypeptide, in a complex of the present disclosure.

[0182] In some cases, a suitable variant Cas9 polypeptide comprises an amino acid sequence having 80% or more amino acid sequence identity to amino acids 7-166 or 731-1003 of the Cas9 amino acid sequence depicted in FIG. 6A (SEQ ID NO:5), or to the corresponding portions in any of the amino acid sequences set forth as SEQ ID NOs:6-826. Any Cas9 protein as defined above can be used as a Cas9 polypeptide, or as part of a chimeric Cas9 polypeptide, in a complex of the present disclosure.

[0183] In some cases, a suitable variant Cas9 polypeptide comprises an amino acid sequence having 85% or more amino acid sequence identity to amino acids 7-166 or 731-1003 of the Cas9 amino acid sequence depicted in FIG. 6A (SEQ ID NO:5), or to the corresponding portions in any of the amino acid sequences set forth as SEQ ID NOs:6-826. Any Cas9 protein as defined above can be used as a Cas9 polypeptide, or as part of a chimeric Cas9 polypeptide, in a complex of the present disclosure.

[0184] In some cases, a suitable variant Cas9 polypeptide comprises an amino acid sequence having 90% or more amino acid sequence identity to amino acids 7-166 or 731-1003 of the Cas9 amino acid sequence depicted in FIG. 6A (SEQ ID NO:5), or to the corresponding portions in any of the amino acid sequences set forth as SEQ ID NOs:6-826. Any Cas9 protein as defined above can be used as a Cas9 polypeptide, or as part of a chimeric Cas9 polypeptide, in a complex of the present disclosure.

[0185] In some cases, a suitable variant Cas9 polypeptide comprises an amino acid sequence having 95% or more amino acid sequence identity to amino acids 7-166 or 731-1003 of the Cas9 amino acid sequence depicted in FIG. 6A (SEQ ID NO:5), or to the corresponding portions in any of the amino acid sequences set forth as SEQ ID NOs:6-826. Any Cas9 protein as defined above can be used as a Cas9 polypeptide, or as part of a chimeric Cas9 polypeptide, in a complex of the present disclosure.

[0186] In some cases, a suitable variant Cas9 polypeptide comprises an amino acid sequence having 99% or more amino acid sequence identity to amino acids 7-166 or 731-1003 of the Cas9 amino acid sequence depicted in FIG. 6A (SEQ ID NO:5), or to the corresponding portions in any of the amino acid sequences set forth as SEQ ID NOs:6-826. Any Cas9 protein as defined above can be used as a Cas9 polypeptide, or as part of a chimeric Cas9 polypeptide, in a complex of the present disclosure.

[0187] In some cases, a suitable variant Cas9 polypeptide comprises an amino acid sequence having 100% amino acid sequence identity to amino acids 7-166 or 731-1003 of the Cas9 amino acid sequence depicted in FIG. 6A (SEQ ID NO:5), or to the corresponding portions in any of the amino acid sequences set forth as SEQ ID NOs:6-826. Any Cas9 protein as defined above can be used as a Cas9 polypeptide, or as part of a chimeric Cas9 polypeptide, in a complex of the present disclosure.

[0188] In some cases, a suitable variant Cas9 polypeptide comprises an amino acid sequence having 60% or more, 70% or more, 75% or more, 80% or more, 85% or more, 90% or more, 95% or more, 99% or more, or 100% amino acid sequence identity to the Cas9 amino acid sequence depicted in FIG. 6A (SEQ ID NO:5), or to any of the amino acid sequences set forth as SEQ ID NOs:6-826. Any Cas9 protein as defined above can be used as a variant Cas9 polypeptide or as part of a chimeric variant Cas9 polypeptide in a complex of the present disclosure.

[0189] In some cases, a suitable variant Cas9 polypeptide comprises an amino acid sequence having 60% or more amino acid sequence identity to the Cas9 amino acid sequence depicted in FIG. 6A (SEQ ID NO:5), or to any of the amino acid sequences set forth as SEQ ID NOs:6-826. Any Cas9 protein as defined above can be used as a variant Cas9 polypeptide or as part of a chimeric variant Cas9 polypeptide in a complex of the present disclosure.

[0190] In some cases, a suitable variant Cas9 polypeptide comprises an amino acid sequence having 70% or more amino acid sequence identity to the Cas9 amino acid sequence depicted in FIG. 6A (SEQ ID NO:5), or to any of the amino acid sequences set forth as SEQ ID NOs:6-826. Any Cas9 protein as defined above can be used as a variant Cas9 polypeptide or as part of a chimeric variant Cas9 polypeptide in a complex of the present disclosure.

[0191] In some cases, a suitable variant Cas9 polypeptide comprises an amino acid sequence having 75% or more amino acid sequence identity to the Cas9 amino acid sequence depicted in FIG. 6A (SEQ ID NO:5), or to any of the amino acid sequences set forth as SEQ ID NOs:6-826. Any Cas9 protein as defined above can be used as a variant Cas9 polypeptide or as part of a chimeric variant Cas9 polypeptide in a complex of the present disclosure.

[0192] In some cases, a suitable variant Cas9 polypeptide comprises an amino acid sequence having 80% or more amino acid sequence identity to the Cas9 amino acid sequence depicted in FIG. 6A (SEQ ID NO:5), or to any of the amino acid sequences set forth as SEQ ID NOs:6-826. Any Cas9 protein as defined above can be used as a variant Cas9 polypeptide or as part of a chimeric variant Cas9 polypeptide in a complex of the present disclosure.

[0193] In some cases, a suitable variant Cas9 polypeptide comprises an amino acid sequence having 85% or more amino acid sequence identity to the Cas9 amino acid sequence depicted in FIG. 6A (SEQ ID NO:5), or to any of the amino acid sequences set forth as SEQ ID NOs:6-826. Any Cas9 protein as defined above can be used as a variant Cas9 polypeptide or as part of a chimeric variant Cas9 polypeptide in a complex of the present disclosure.

[0194] In some cases, a suitable variant Cas9 polypeptide comprises an amino acid sequence having 90% or more amino acid sequence identity to the Cas9 amino acid sequence depicted in FIG. 6A (SEQ ID NO:5), or to any of the amino acid sequences set forth as SEQ ID NOs:6-826. Any Cas9 protein as defined above can be used as a variant Cas9 polypeptide or as part of a chimeric variant Cas9 polypeptide in a complex of the present disclosure.

[0195] In some cases, a suitable variant Cas9 polypeptide comprises an amino acid sequence having 95% or more amino acid sequence identity to the Cas9 amino acid sequence depicted in FIG. 6A (SEQ ID NO:5), or to any of the amino acid sequences set forth as SEQ ID NOs:6-826. Any Cas9 protein as defined above can be used as a variant Cas9 polypeptide or as part of a chimeric variant Cas9 polypeptide in a complex of the present disclosure.

[0196] In some cases, a suitable variant Cas9 polypeptide comprises an amino acid sequence having 99% or more amino acid sequence identity to the Cas9 amino acid sequence depicted in FIG. 6A (SEQ ID NO:5), or to any of the amino acid sequences set forth as SEQ ID NOs:6-826. Any Cas9 protein as defined above can be used as a variant Cas9 polypeptide or as part of a chimeric variant Cas9 polypeptide in a complex of the present disclosure.

[0197] In some cases, a suitable variant Cas9 polypeptide comprises an amino acid sequence having 100% amino acid sequence identity to the Cas9 amino acid sequence depicted in FIG. 6A (SEQ ID NO:5), or to any of the amino acid sequences set forth as SEQ ID NOs:6-826. Any Cas9 protein as defined above can be used as a variant Cas9 polypeptide or as part of a chimeric variant Cas9 polypeptide in a complex of the present disclosure.

### Chimeric Polypeptides (Fusion Polypeptides)

[0198] In some embodiments, a variant Cas9 polypeptide is a chimeric Cas9 polypeptide (also referred to herein as a fusion polypeptide, e.g., a “Cas9 fusion polypeptide”). A Cas9 fusion polypeptide can bind and/or modify a target nucleic acid (e.g., cleave, methylate, demethylate, etc.) and/or a polypeptide associated with target nucleic acid (e.g., methylation, acetylation, etc., of, for example, a histone tail).

[0199] A Cas9 fusion polypeptide is a variant Cas9 polypeptide by virtue of differing in sequence from a wild type Cas9 polypeptide (e.g., a naturally occurring Cas9 polypeptide). A Cas9 fusion polypeptide is a Cas9 polypeptide (e.g., a wild type Cas9 polypeptide, a variant Cas9 polypeptide, a variant Cas9 polypeptide with reduced nuclease activity (as described above), and the like) fused to a covalently linked heterologous polypeptide (also referred to as a “fusion partner”). In some cases, a Cas9 fusion polypeptide is a variant Cas9 polypeptide with reduced nuclease activity (e.g., dCas9) fused to a covalently linked heterologous polypeptide. In some cases, the heterologous polypeptide exhibits (and therefore provides for) an activity (e.g., an enzymatic activity) that will also be exhibited by the Cas9 fusion polypeptide (e.g., methyltransferase activity, acetyltransferase activity, kinase activity, ubiquitinating activity, etc.). In some such cases, a method of binding, e.g., where the Cas9 polypeptide is a variant Cas9 polypeptide having a fusion partner (i.e., having a heterologous polypeptide) with an activity (e.g., an enzymatic activity) that modifies the target nucleic acid, the method can also be considered to be a method of modifying the target nucleic acid. In some cases, a method of binding a target nucleic acid (e.g., a single stranded target nucleic acid) can result in modification of the target nucleic acid. Thus, in some cases, a method of binding a target nucleic acid (e.g., a single stranded target nucleic acid) can be a method of modifying the target nucleic acid.

[0200] In some cases, the heterologous sequence provides for subcellular localization, i.e., the heterologous sequence is a subcellular localization sequence (e.g., a nuclear localization signal (NLS) for targeting to the nucleus, a sequence to keep the fusion protein out of the nucleus, e.g., a nuclear export sequence (NES), a sequence to keep the fusion protein retained in the cytoplasm, a mitochondrial localization signal for targeting to the mitochondria, a chloroplast localization signal for targeting to a chloroplast, an endoplasmic reticulum (ER) retention signal, and the like). In some embodiments, a variant Cas9 does not include a NLS so that the protein is not targeted to the nucleus (which can be advantageous, e.g., when the target nucleic acid is an RNA that is present in the cytosol). In some embodiments, the heterologous sequence can provide a tag (i.e., the heterologous sequence is a detectable label) for ease of tracking and/or purification (e.g., a fluorescent protein, e.g., green fluorescent protein (GFP), YFP, RFP, CFP, mCherry, tdTomato, and the like; a histidine tag, e.g., a 6×His tag; a hemagglutinin (HA) tag; a FLAG tag; a Myc tag; and the like). In some embodiments, the heterologous sequence can provide for increased or decreased stability (i.e., the heterologous sequence is a stability control peptide, e.g., a degron, which in some cases is controllable (e.g., a temperature sensitive or drug controllable degron sequence, see below). In some embodiments, the heterologous sequence can provide for increased or decreased transcription from the target nucleic acid (i.e., the heterologous sequence is a transcription modulation sequence, e.g., a transcription factor/activator or a fragment thereof, a protein or fragment thereof that recruits a transcription factor/activator, a transcription repressor or a fragment thereof, a protein or fragment thereof that recruits a transcription repressor, a small molecule/drug-responsive transcription regulator, etc.). In some embodiments, the heterologous sequence can provide a binding domain (i.e., the heterologous sequence is a protein binding sequence, e.g., to provide the ability of a Cas9 fusion polypeptide to bind to another protein of interest, e.g., a DNA or histone modifying protein, a transcription factor or transcription repressor, a recruiting protein, an RNA modification enzyme, an RNA-binding protein, a translation initiation factor, an RNA splicing factor, etc.). A heterologous nucleic acid sequence may be linked to another nucleic acid sequence (e.g., by genetic engineering) to generate a chimeric nucleotide sequence encoding a chimeric polypeptide.

[0201] A subject Cas9 fusion polypeptide (Cas9 fusion protein) can have multiple (1 or more, 2 or more, 3 or more, etc.) fusion partners in any combination of the above. As an illustrative example, a Cas9 fusion protein can have a heterologous sequence that provides an activity (e.g., for transcription modulation, target modification, modification of a protein associated with a target nucleic acid, etc.) and can also have a subcellular localization sequence. In some cases, such a Cas9 fusion protein might also have a tag for ease of tracking and/or purification (e.g., green fluorescent protein (GFP), YFP, RFP, CFP, mCherry, tdTomato, and the like; a histidine tag, e.g., a 6×His tag; a hemagglutinin (HA) tag; a FLAG tag; a Myc tag; and the like). As another illustrative example, a Cas9 protein can have one or more NLSs (e.g., two or more, three or more, four or more, five or more, 1, 2, 3, 4, or 5 NLSs). In some cases a fusion partner (or multiple fusion partners) (e.g., an NLS, a tag, a fusion partner providing an activity, etc.) is located at or near the C-terminus of Cas9. In some cases a fusion partner (or multiple fusion partners) (e.g., an NLS, a tag, a fusion partner providing an activity, etc.) is located at the N-terminus of Cas9. In some cases a Cas9 has a fusion partner (or multiple fusion partners)(e.g., an NLS, a tag, a fusion partner providing an activity, etc.) at both the N-terminus and C-terminus.

[0202] Suitable fusion partners that provide for increased or decreased stability include, but are not limited to degron sequences. Degrons are readily understood by one of ordinary skill in the art to be amino acid sequences that control the stability of the protein of which they are part. For example, the stability of a protein comprising a degron sequence is controlled in part by the degron sequence. In some cases, a suitable degron is constitutive such that the degron exerts its influence on protein stability independent of experimental control (i.e., the degron is not drug inducible, temperature inducible, etc.) In some cases, the degron provides the variant Cas9 polypeptide with controllable stability such that the variant Cas9 polypeptide can be turned “on” (i.e., stable) or “off” (i.e., unstable, degraded) depending on the desired conditions. For example, if the degron is a temperature sensitive degron, the variant Cas9 polypeptide may be functional (i.e., “on”, stable) below a threshold temperature (e.g., 42° C., 41° C., 40° C., 39° C., 38° C., 37° C., 36° C., 35° C., 34° C., 33° C., 32° C., 31° C., 30° C., etc.) but non-functional (i.e., “off”, degraded) above the threshold temperature. As another example, if the degron is a drug inducible degron, the presence or absence of drug can switch the protein from an “off” (i.e., unstable) state to an “on” (i.e., stable) state or vice versa. An exemplary drug inducible degron is derived from the FKBP12 protein. The stability of the degron is controlled by the presence or absence of a small molecule that binds to the degron.

[0203] Examples of suitable degrons include, but are not limited to those degrons controlled by Shield-1, DHFR, auxins, and/or temperature. Non-limiting examples of suitable degrons are known in the art (e.g., Dohmen et al., Science, 1994. 263(5151): p. 1273-1276: Heat-inducible degron: a method for constructing temperature-sensitive mutants; Schoeber et al., Am J Physiol Renal Physiol. 2009 January; 296(1):F204-11: Conditional fast expression and function of multimeric TRPVS channels using Shield-1; Chu et al., Bioorg Med Chem Lett. 2008 Nov. 15; 18(22):5941-4: Recent progress with FKBP-derived destabilizing domains; Kanemaki, Pflugers Arch. 2012 Dec. 28: Frontiers of protein expression control with conditional degrons; Yang et al., Mol Cell. 2012 Nov. 30; 48(4):487-8: Titivated for destruction: the methyl degron; Barbour et al., Biosci Rep. 2013 Jan. 18; 33(1).: Characterization of the bipartite degron that regulates ubiquitin-independent degradation of thymidylate synthase; and Greussing et al., J Vis Exp. 2012 Nov. 10; (69): Monitoring of ubiquitin-proteasome activity in living cells using a Degron (dgn)-destabilized green fluorescent protein (GFP)-based reporter protein; all of which are hereby incorporated in their entirety by reference).

[0204] Exemplary degron sequences have been well-characterized and tested in both cells and animals Thus, fusing Cas9 (e.g., wild type Cas9; variant Cas9; variant Cas9 with reduced nuclease activity, e.g., dCas9; and the like) to a degron sequence produces a “tunable” and “inducible” Cas9 polypeptide. Any of the fusion partners described herein can be used in any desirable combination. As one non-limiting example to illustrate this point, a Cas9 fusion protein (i.e., a chimeric Cas9 polypeptide) can comprise a YFP sequence for detection, a degron sequence for stability, and transcription activator sequence to increase transcription of the target nucleic acid. A suitable reporter protein for use as a fusion partner for a Cas9 polypeptide (e.g., wild type Cas9, variant Cas9, variant Cas9 with reduced nuclease function, etc.), includes, but is not limited to, the following exemplary proteins (or functional fragment thereof): his3, 13-galactosidase, a fluorescent protein (e.g., GFP, RFP, YFP, cherry, tomato, etc., and various derivatives thereof), luciferase, β-glucuronidase, and alkaline phosphatase. Furthermore, the number of fusion partners that can be used in a Cas9 fusion protein is unlimited. In some cases, a Cas9 fusion protein comprises one or more (e.g. two or more, three or more, four or more, or five or more) heterologous sequences.

[0205] Suitable fusion partners include, but are not limited to, a polypeptide that provides for methyltransferase activity, demethylase activity, acetyltransferase activity, deacetylase activity, kinase activity, phosphatase activity, ubiquitin ligase activity, deubiquitinating activity, adenylation activity, deadenylation activity, SUMOylating activity, deSUMOylating activity, ribosylation activity, deribosylation activity, myristoylation activity, or demyristoylation activity, any of which can be directed at modifying nucleic acid directly (e.g., methylation of DNA or RNA) or at modifying a nucleic acid-associated polypeptide (e.g., a histone, a DNA binding protein, and RNA binding protein, and the like). Further suitable fusion partners include, but are not limited to boundary elements (e.g., CTCF), proteins and fragments thereof that provide periphery recruitment (e.g., Lamin A, Lamin B, etc.), and protein docking elements (e.g., FKBP/FRB, Pi11/Aby1, etc.).

[0206] Examples of various additional suitable fusion partners (or fragments thereof) for a subject variant Cas9 polypeptide include, but are not limited to those listed in FIGS. 8A-C and are also described in the PCT patent applications: WO2010/075303, WO2012/068627, and WO2013/155555 which are hereby incorporated by reference in their entirety.

[0207] Suitable fusion partners include, but are not limited to, a polypeptide that provides an activity that indirectly increases transcription by acting directly on the target nucleic acid or on a polypeptide (e.g., a histone, a DNA-binding protein, an RNA-binding protein, an RNA editing protein, etc.) associated with the target nucleic acid. Suitable fusion partners include, but are not limited to, a polypeptide that provides for methyltransferase activity, demethylase activity, acetyltransferase activity, deacetylase activity, kinase activity, phosphatase activity, ubiquitin ligase activity, deubiquitinating activity, adenylation activity, deadenylation activity, SUMOylating activity, deSUMOylating activity, ribosylation activity, deribosylation activity, myristoylation activity, or demyristoylation activity.

[0208] Additional suitable fusion partners include, but are not limited to, a polypeptide that directly provides for increased transcription and/or translation of a target nucleic acid (e.g., a transcription activator or a fragment thereof, a protein or fragment thereof that recruits a transcription activator, a small molecule/drug-responsive transcription and/or translation regulator, a translation-regulating protein, etc.).

[0209] Non-limiting examples of fusion partners to accomplish increased or decreased transcription are listed in FIG. 8A-8C and include transcription activator and transcription repressor domains (e.g., the Krüppel associated box (KRAB or SKD); the Mad mSIN3 interaction domain (SID); the ERF repressor domain (ERD), etc.). In some such cases, a Cas9 fusion protein is targeted by the guide nucleic acid to a specific location (i.e., sequence) in the target nucleic acid and exerts locus-specific regulation such as blocking RNA polymerase binding to a promoter (which selectively inhibits transcription activator function), and/or modifying the local chromatin status (e.g., when a fusion sequence is used that modifies the target nucleic acid or modifies a polypeptide associated with the target nucleic acid). In some cases, the changes are transient (e.g., transcription repression or activation). In some cases, the changes are inheritable (e.g., when epigenetic modifications are made to the target nucleic acid or to proteins associated with the target nucleic acid, e.g., nucleosomal histones).

[0210] Non-limiting examples of fusion partners for use when targeting ssRNA target nucleic acids are listed in FIG. 8A and include (but are not limited to): splicing factors (e.g., RS domains); protein translation components (e.g., translation initiation, elongation, and/or release factors; e.g., eIF4G); RNA methylases; RNA editing enzymes (e.g., RNA deaminases, e.g., adenosine deaminase acting on RNA (ADAR), including A to I and/or C to U editing enzymes); helicases; RNA-binding proteins; and the like. It is understood that a fusion partner can include the entire protein or in some cases can include a fragment of the protein (e.g., a functional domain).

[0211] In some embodiments, the heterologous sequence can be fused to the C-terminus of the Cas9 polypeptide. In some embodiments, the heterologous sequence can be fused to the N-terminus of the Cas9 polypeptide. In some embodiments, the heterologous sequence can be fused to an internal portion (i.e., a portion other than the N- or C-terminus) of the Cas9 polypeptide.

[0212] In addition to the fusion partners listed in FIGS. 8A-8C the fusion partner of a chimeric Cas9 polypeptide can be any domain capable of interacting with ssRNA (which, for the purposes of this disclosure, includes intramolecular and/or intermolecular secondary structures, e.g., double-stranded RNA duplexes such as hairpins, stem-loops, etc.), whether transiently or irreversibly, directly or indirectly, including but not limited to an effector domain selected from the group comprising; Endonucleases (for example RNase III, the CRR22 DYW domain, Dicer, and PIN (PilT N-terminus) domains from proteins such as SMG5 and SMG6); proteins and protein domains responsible for stimulating RNA cleavage (for example CPSF, CstF, CFIm and CFIIm); Exonucleases (for example XRN-1 or Exonuclease T); Deadenylases (for example HNT3); proteins and protein domains responsible for nonsense mediated RNA decay (for example UPF1, UPF2, UPF3, UPF3b, RNP S1, Y14, DEK, REF2, and SRm160); proteins and protein domains responsible for stabilizing RNA (for example PABP); proteins and protein domains responsible for repressing translation (for example Ago2 and Ago4); proteins and protein domains responsible for stimulating translation (for example Staufen); proteins and protein domains responsible for (e.g., capable of) modulating translation (e.g., translation factors such as initiation factors, elongation factors, release factors, etc., e.g., eIF4G); proteins and protein domains responsible for polyadenylation of RNA (for example PAP1, GLD-2, and Star-PAP); proteins and protein domains responsible for polyuridinylation of RNA (for example CI D1 and terminal uridylate transferase); proteins and protein domains responsible for RNA localization (for example from IMP1, ZBP1, She2p, She3p, and Bicaudal-D); proteins and protein domains responsible for nuclear retention of RNA (for example Rrp6); proteins and protein domains responsible for nuclear export of RNA (for example TAP, NXF1, THO, TREX, REF, and Aly); proteins and protein domains responsible for repression of RNA splicing (for example PTB, Sam68, and hnRNP A1); proteins and protein domains responsible for stimulation of RNA splicing (for example Serine/Arginine-rich (SR) domains); proteins and protein domains responsible for reducing the efficiency of transcription (for example FUS (TLS)); and proteins and protein domains responsible for stimulating transcription (for example CDK7 and HIV Tat). Alternatively, the effector domain may be selected from the group comprising Endonucleases; proteins and protein domains capable of stimulating RNA cleavage; Exonucleases; Deadenylases; proteins and protein domains having nonsense mediated RNA decay activity; proteins and protein domains capable of stabilizing RNA; proteins and protein domains capable of repressing translation; proteins and protein domains capable of stimulating translation; proteins and protein domains capable of modulating translation (e.g., translation factors such as initiation factors, elongation factors, release factors, etc., e.g., eIF4G); proteins and protein domains capable of polyadenylation of RNA; proteins and protein domains capable of polyuridinylation of RNA; proteins and protein domains having RNA localization activity; proteins and protein domains capable of nuclear retention of RNA; proteins and protein domains having RNA nuclear export activity; proteins and protein domains capable of repression of RNA splicing; proteins and protein domains capable of stimulation of RNA splicing; proteins and protein domains capable of reducing the efficiency of transcription; and proteins and protein domains capable of stimulating transcription. Another suitable fusion partner is a PUF RNA-binding domain, which is described in more detail in WO2012068627.

[0213] Some RNA splicing factors that can be used (in whole or as fragments thereof) as fusion partners for a Cas9 polypeptide have modular organization, with separate sequence-specific RNA binding modules and splicing effector domains. For example, members of the Serine/Arginine-rich (SR) protein family contain N-terminal RNA recognition motifs (RRMs) that bind to exonic splicing enhancers (ESEs) in pre-mRNAs and C-terminal RS domains that promote exon inclusion. As another example, the hnRNP protein hnRNP Al binds to exonic splicing silencers (ESSs) through its RRM domains and inhibits exon inclusion through a C-terminal Glycine-rich domain. Some splicing factors can regulate alternative use of splice site (ss) by binding to regulatory sequences between the two alternative sites. For example, ASF/SF2 can recognize ESEs and promote the use of intron proximal sites, whereas hnRNP Al can bind to ESSs and shift splicing towards the use of intron distal sites. One application for such factors is to generate ESFs that modulate alternative splicing of endogenous genes, particularly disease associated genes. For example, Bcl-x pre-mRNA produces two splicing isoforms with two alternative 5′ splice sites to encode proteins of opposite functions. The long splicing isoform Bch xL is a potent apoptosis inhibitor expressed in long-lived postmitotic cells and is up-regulated in many cancer cells, protecting cells against apoptotic signals. The short isoform Bcl-xS is a pro-apoptotic isoform and expressed at high levels in cells with a high turnover rate (e.g., developing lymphocytes). The ratio of the two Bcl-x splicing isoforms is regulated by multiple c\acute{ω}-elements that are located in either the core exon region or the exon extension region (i.e., between the two alternative 5′ splice sites). For more examples, see WO2010075303.

[0214] In some embodiments, a Cas9 polypeptide (e.g., a wild type Cas9, a variant Cas9, a variant Cas9 with reduced nuclease activity, etc.) can be linked to a fusion partner via a peptide spacer.

[0215] In some cases, a Cas9 polypeptide comprises a “Protein Transduction Domain” or PTD (also known as a CPP—cell penetrating peptide), which may refer to a polypeptide, polynucleotide, carbohydrate, or organic or inorganic compound that facilitates traversing a lipid bilayer, micelle, cell membrane, organelle membrane, or vesicle membrane. A PTD attached to another molecule, which can range from a small polar molecule to a large macromolecule and/or a nanoparticle, facilitates the molecule traversing a membrane, for example going from extracellular space to intracellular space, or cytosol to within an organelle. In some cases, a PTD attached to another molecule facilitates entry of the molecule into the nucleus (e.g., in some cases, a PTD includes a nuclear localization signal (NLS)). In some cases, a Cas9 polypeptide comprises two or more NLSs, e.g., two or more NLSs in tandem. In some cases, a PTD is covalently linked to the amino terminus of a Cas9 polypeptide. In some cases, a PTD is covalently linked to the carboxyl terminus of a Cas9 polypeptide. In some cases, a PTD is covalently linked to the amino terminus and to the carboxyl terminus of a Cas9 polypeptide. In some cases, a PTD is covalently linked to a nucleic acid (e.g., a guide nucleic acid, a polynucleotide encoding a guide nucleic acid, a polynucleotide encoding a Cas9 polypeptide, etc.). Exemplary PTDs include but are not limited to a minimal undecapeptide protein transduction domain (corresponding to residues 47-57 of HIV-1 TAT comprising YGRKKRRQRRR; SEQ ID NO:1086); a polyarginine sequence comprising a number of arginines sufficient to direct entry into a cell (e.g., 3, 4, 5, 6, 7, 8, 9, 10, or 10-50 arginines); a VP22 domain (Zender et al. (2002) Cancer Gene Ther. 9(6):489-96); an Drosophila Antennapedia protein transduction domain (Noguchi et al. (2003) Diabetes 52(7):1732-1737); a truncated human calcitonin peptide (Trehin et al. (2004) Pharm. Research 21:1248-1256); polylysine (Wender et al. (2000) Proc. Natl. Acad. Sci. USA 97:13003-13008); RRQRRTSKLMKR (SEQ ID NO:1087); Transportan GWTLNSAGYLLGKINLKALAALAKKIL (SEQ ID NO:1088); KALAWEAKLAKALAKALAKHLAKALAKALKCEA (SEQ ID NO:1089); and RQIKIWFQNRRMKWKK (SEQ ID NO:1090). Exemplary PTDs include but are not limited to, YGRKKRRQRRR (SEQ ID NO:1091), RKKRRQRRR (SEQ ID NO:1092); an arginine homopolymer of from 3 arginine residues to 50 arginine residues; Exemplary PTD domain amino acid sequences include, but are not limited to, any of the following: YGRKKRRQRRR (SEQ ID NO:1093); RKKRRQRR (SEQ ID NO:1094); YARAAARQARA (SEQ ID NO:1095); THRLPRRRRRR (SEQ ID NO:1096); and GGRRARRRRRR (SEQ ID NO:1097). In some embodiments, the PTD is an activatable CPP (ACPP) (Aguilera et al. (2009) Integr Biol (Camb) June; 1(5-6): 371-381). ACPPs comprise a polycationic CPP (e.g., Arg9 or “R9”) connected via a cleavable linker to a matching polyanion (e.g., Glu9 or “E9”), which reduces the net charge to nearly zero and thereby inhibits adhesion and uptake into cells. Upon cleavage of the linker, the polyanion is released, locally unmasking the polyarginine and its inherent adhesiveness, thus “activating” the ACPP to traverse the membrane.

### Type V CRISPR Site-Directed Modifying Polypeptides

[0216] In some cases, a complex of the present disclosure comprises a Type V CRISPR site-directed modifying polypeptide. A Type V CRISPR site-directed modifying polypeptide is also referred to herein as a “Cpf1 polypeptide.” In some cases, the Cpf1 polypeptide is enzymatically active, e.g., the Cpf1 polypeptide, when bound to a guide RNA, cleaves a target nucleic acid. In some cases, the Cpf1 polypeptide exhibits reduced enzymatic activity relative to a wild-type Cpf1 polypeptide (e.g., relative to a Cpf1 polypeptide comprising the amino acid sequence depicted in FIG. 9), and retains DNA binding activity.

[0217] In some cases, a Cpf1 polypeptide comprises an amino acid sequence having at least 30%, at least 35%, at least 40%, at least 45%, at least 50%, at least 55%, at least 60%, at least 65%, at least 70%, at least 75%, at least 80%, at least 85%, at least 90%, at least 95%, at least 90%, or 100%, amino acid sequence identity to the amino acid sequence depicted in FIG. 9. In some cases, a Cpf1 polypeptide comprises an amino acid sequence having at least 30%, at least 35%, at least 40%, at least 45%, at least 50%, at least 55%, at least 60%, at least 65%, at least 70%, at least 75%, at least 80%, at least 85%, at least 90%, at least 95%, at least 90%, or 100%, amino acid sequence identity to a contiguous stretch of from 100 amino acids to 200 amino acids (aa), from 200 aa to 400 aa, from 400 aa to 600 aa, from 600 aa to 800 aa, from 800 aa to 1000 aa, from 1000 aa to 1100 aa, from 1100 aa to 1200 aa, or from 1200 aa to 1300 aa, of the amino acid sequence depicted in FIG. 9.

[0218] In some cases, a Cpf1 polypeptide comprises an amino acid sequence having at least 30%, at least 35%, at least 40%, at least 45%, at least 50%, at least 55%, at least 60%, at least 65%, at least 70%, at least 75%, at least 80%, at least 85%, at least 90%, at least 95%, at least 90%, or 100%, amino acid sequence identity to the RuvCI domain of a Cpf1 polypeptide of the amino acid sequence depicted in FIG. 9. In some cases, a Cpf1 polypeptide comprises an amino acid sequence having at least 30%, at least 35%, at least 40%, at least 45%, at least 50%, at least 55%, at least 60%, at least 65%, at least 70%, at least 75%, at least 80%, at least 85%, at least 90%, at least 95%, at least 90%, or 100%, amino acid sequence identity to the RuvCII domain of a Cpf1 polypeptide of the amino acid sequence depicted in FIG. 9. In some cases, a Cpf1 polypeptide comprises an amino acid sequence having at least 30%, at least 35%, at least 40%, at least 45%, at least 50%, at least 55%, at least 60%, at least 65%, at least 70%, at least 75%, at least 80%, at least 85%, at least 90%, at least 95%, at least 90%, or 100%, amino acid sequence identity to the RuvCIII domain of a Cpf1 polypeptide of the amino acid sequence depicted in FIG. 9.

[0219] In some cases, the Cpf1 polypeptide exhibits reduced enzymatic activity relative to a wild-type Cpf1 polypeptide (e.g., relative to a Cpf1 polypeptide comprising the amino acid sequence depicted in FIG. 9), and retains DNA binding activity. In some cases, a Cpf1 polypeptide comprises an amino acid sequence having at least 30%, at least 35%, at least 40%, at least 45%, at least 50%, at least 55%, at least 60%, at least 65%, at least 70%, at least 75%, at least 80%, at least 85%, at least 90%, at least 95%, at least 90%, or 100%, amino acid sequence identity to the amino acid sequence depicted in FIG. 9; and comprises an amino acid substitution (e.g., a D-*A substitution) at an amino acid residue corresponding to amino acid 917 of the amino acid sequence depicted in FIG. 9. In some cases, a Cpf1 polypeptide comprises an amino acid sequence having at least 30%, at least 35%, at least 40%, at least 45%, at least 50%, at least 55%, at least 60%, at least 65%, at least 70%, at least 75%, at least 80%, at least 85%, at least 90%, at least 95%, at least 90%, or 100%, amino acid sequence identity to the amino acid sequence depicted in FIG. 9; and comprises an amino acid substitution (e.g., an E→A substitution) at an amino acid residue corresponding to amino acid 1006 of the amino acid sequence depicted in FIG. 9. In some cases, a Cpf1 polypeptide comprises an amino acid sequence having at least 30%, at least 35%, at least 40%, at least 45%, at least 50%, at least 55%, at least 60%, at least 65%, at least 70%, at least 75%, at least 80%, at least 85%, at least 90%, at least 95%, at least 90%, or 100%, amino acid sequence identity to the amino acid sequence depicted in FIG. 9; and comprises an amino acid substitution (e.g., a D-*A substitution) at an amino acid residue corresponding to amino acid 1255 of the amino acid sequence depicted in FIG. 9.

[0220] In some cases, the Cpf1 polypeptide is a fusion polypeptide, e.g., where a Cpf1 fusion polypeptide comprises: a) a Cpf1 polypeptide; and b) a heterologous fusion partner. In some cases, the heterologous fusion partner is fused to the N-terminus of the Cpf1 polypeptide. In some cases, the heterologous fusion partner is fused to the C-terminus of the Cpf1 polypeptide. In some cases, the heterologous fusion partner is fused to both the N-terminus and the C-terminus of the Cpf1 polypeptide. In some cases, the heterologous fusion partner is inserted internally within the Cpf1 polypeptide.

[0221] Suitable heterologous fusion partners include NLS, epitope tags, fluorescent polypeptides, and the like.

### Guide RNA

[0222] Guide RNAs suitable for inclusion in a complex of the present disclosure include single-molecule guide RNAs (“single-guide RNA”/“sgRNA”) and dual-molecule guide RNAs (“dual-guide RNA”/“dgRNA”).

[0223] A guide nucleic acid (e.g., guide RNA) suitable for inclusion in a complex of the present disclosure directs the activities of a polypeptide (e.g., a Cas9 polypeptide) to a specific target sequence within a target nucleic acid. A guide nucleic acid (e.g., guide RNA) comprises: a first segment (also referred to herein as a “nucleic acid targeting segment”, or simply a “targeting segment”); and a second segment (also referred to herein as a “protein-binding segment”).

[0224] First Segment: Targeting Segment

[0225] The first segment of a guide nucleic acid (e.g., guide RNA) includes a nucleotide sequence that is complementary to a sequence (a target site) in a target nucleic acid. In other words, the targeting segment of a guide nucleic acid (e.g., guide RNA) can interact with a target nucleic acid (e.g., an RNA, a DNA, a double-stranded DNA) in a sequence-specific manner via hybridization (i.e., base pairing). As such, the nucleotide sequence of the targeting segment may vary and can determine the location within the target nucleic acid that the guide nucleic acid (e.g., guide RNA) and the target nucleic acid will interact. The targeting segment of a guide nucleic acid (e.g., guide RNA) can be modified (e.g., by genetic engineering) to hybridize to any desired sequence (target site) within a target nucleic acid.

[0226] The targeting segment can have a length of from 12 nucleotides to 100 nucleotides. For example, the targeting segment can have a length of from 12 nucleotides (nt) to 80 nt, from 12 nt to 50 nt, from 12 nt to 40 nt, from 12 nt to 30 nt, from 12 nt to 25 nt, from 12 nt to 20 nt, or from 12 nt to 19 nt. For example, the targeting segment can have a length of from 17 nt to 20 nt, from 17 nt to 25 nt, from 17 nt to 30 nt, from 17 nt to 35 nt, from 17 nt to 40 nt, from 17 nt to 45 nt, from 17 nt to 50 nt, from 17 nt to 60 nt, from 17 nt to 70 nt, from 17 nt to 80 nt, from 17 nt to 90 nt, 18 nt to 20 nt, from 18 nt to 25 nt, from 18 nt to 30 nt, from 18 nt to 35 nt, from 18 nt to 40 nt, from 18 nt to 45 nt, from 18 nt to 50 nt, from 18 nt to 60 nt, from 18 nt to 70 nt, from 18 nt to 80 nt, from 18 nt to 90 nt, 19 nt to 20 nt, from 19 nt to 25 nt, from 19 nt to 30 nt, from 19 nt to 35 nt, from 19 nt to 40 nt, from 19 nt to 45 nt, from 19 nt to 50 nt, from 19 nt to 60 nt, from 19 nt to 70 nt, from 19 nt to 80 nt, from 19 nt to 90 nt, from 19 nt to 100 nt, from 20 nt to 25 nt, from 20 nt to 30 nt, from 20 nt to 35 nt, from 20 nt to 40 nt, from 20 nt to 45 nt, from 20 nt to 50 nt, from 20 nt to 60 nt, from 20 nt to 70 nt, from 20 nt to 80 nt, from 20 nt to 90 nt, or from 20 nt to 100 nt.

[0227] The nucleotide sequence (the targeting sequence, also referred to as a guide sequence) of the targeting segment that is complementary to a nucleotide sequence (target site) of the target nucleic acid can have a length of 12 nt or more. For example, the targeting sequence of the targeting segment that is complementary to a target site of the target nucleic acid can have a length of 12 nt or more, 15 nt or more, 17 nt or more, 18 nt or more, 19 nt or more, 20 nt or more, 25 nt or more, 30 nt or more, 35 nt or more or 40 nt. For example, the targeting sequence of the targeting segment that is complementary to a target sequence of the target nucleic acid can have a length of from 12 nucleotides (nt) to 80 nt, from 12 nt to 50 nt, from 12 nt to 45 nt, from 12 nt to 40 nt, from 12 nt to 35 nt, from 12 nt to 30 nt, from 12 nt to 25 nt, from 12 nt to 20 nt, from 12 nt to 19 nt, from 17 nt to 20 nt, from 17 nt to 25 nt, from 17 nt to 30 nt, from 17 nt to 35 nt, from 17 nt to 40 nt, from 17 nt to 45 nt, from 17 nt to 50 nt, from 17 nt to 60 nt, from 18 nt to 20 nt, from 18 nt to 25 nt, from 18 nt to 30 nt, from 18 nt to 35 nt, from 18 nt to 40 nt, from 18 nt to 45 nt, from 18 nt to 50 nt, from 18 nt to 60 nt, from 19 nt to 20 nt, from 19 nt to 25 nt, from 19 nt to 30 nt, from 19 nt to 35 nt, from 19 nt to 40 nt, from 19 nt to 45 nt, from 19 nt to 50 nt, from 19 nt to 60 nt, from 20 nt to 25 nt, from 20 nt to 30 nt, from 20 nt to 35 nt, from 20 nt to 40 nt, from 20 nt to 45 nt, from 20 nt to 50 nt, or from 20 nt to 60 nt. The nucleotide sequence (the targeting sequence) of the targeting segment that is complementary to a nucleotide sequence (target site) of the target nucleic acid can have a length of 12 nt or more.

[0228] In some cases, the targeting sequence of the targeting segment that is complementary to a target site of the target nucleic acid is 20 nucleotides in length. In some cases, the targeting sequence of the targeting segment that is complementary to a target site of the target nucleic acid is 19 nucleotides in length. In some cases, the targeting sequence of the targeting segment that is complementary to a target site of the target nucleic acid is 18 nucleotides in length. In some cases, the targeting sequence of the targeting segment that is complementary to a target site of the target nucleic acid is 17 nucleotides in length.

[0229] The percent complementarity between the targeting sequence (i.e., guide sequence) of the targeting segment and the target site of the target nucleic acid can be 60% or more (e.g., 65% or more, 70% or more, 75% or more, 80% or more, 85% or more, 90% or more, 95% or more, 97% or more, 98% or more, 99% or more, or 100%). In some cases, the percent complementarity between the targeting sequence of the targeting segment and the target site of the target nucleic acid is 100% over the seven contiguous 5′-most nucleotides of the target site of the target nucleic acid. In some cases, the percent complementarity between the targeting sequence of the targeting segment and the target site of the target nucleic acid is 60% or more over 20 contiguous nucleotides. In some cases, the percent complementarity between the targeting sequence of the targeting segment and the target site of the target nucleic acid is 100% over the seventeen contiguous 5′-most nucleotides of the target site of the target nucleic acid and as low as 0% or more over the remainder. In such a case, the targeting sequence can be considered to be 17 nucleotides in length. In some cases, the percent complementarity between the targeting sequence of the targeting segment and the target site of the target nucleic acid is 100% over the eighteen contiguous 5′-most nucleotides of the target site of the target nucleic acid and as low as 0% or more over the remainder. In such a case, the targeting sequence can be considered to be 18 nucleotides in length. In some cases, the percent complementarity between the targeting sequence of the targeting segment and the target site of the target nucleic acid is 100% over the nineteen contiguous 5′-most nucleotides of the target site of the target nucleic acid and as low as 0% or more over the remainder. In such a case, the targeting sequence can be considered to be 19 nucleotides in length. In some cases, the percent complementarity between the targeting sequence of the targeting segment and the target site of the target nucleic acid is 100% over the twenty contiguous 5′-most nucleotides of the target site of the target nucleic acid and as low as 0% or more over the remainder. In such a case, the targeting sequence can be considered to be 20 nucleotides in length.

[0230] Second Segment: Protein-Binding Segment

[0231] The protein-binding segment of a subject guide nucleic acid (e.g., guide RNA) interacts with (binds) a Cas9 polypeptide. The subject guide nucleic acid (e.g., guide RNA) guides the bound polypeptide (Cas9) to a specific nucleotide sequence within target nucleic acid (the target site) via the above mentioned targeting segment/targeting sequence/guide sequence. The protein-binding segment of a subject guide nucleic acid (e.g., guide RNA) comprises two stretches of nucleotides that are complementary to one another. The complementary nucleotides of the protein-binding segment hybridize to form a double stranded RNA duplex (dsRNA).

[0232] A subject dual guide nucleic acid (e.g., guide RNA) comprises two separate nucleic acid molecules. Each of the two molecules of a subject dual guide nucleic acid (e.g., guide RNA) comprises a stretch of nucleotides that are complementary to one another such that the complementary nucleotides of the two molecules hybridize to form the double stranded RNA duplex of the protein-binding segment.

[0233] In some embodiments, the duplex-forming segment of the activator is 60% or more identical to one of the activator (tracrRNA) molecules set forth in SEQ ID NOs:837-967, or a complement thereof, over a stretch of 8 or more contiguous nucleotides (e.g., 8 or more contiguous nucleotides, 10 or more contiguous nucleotides, 12 or more contiguous nucleotides, 15 or more contiguous nucleotides, or 20 or more contiguous nucleotides). For example, the duplex-forming segment of the activator (or the DNA encoding the duplex-forming segment of the activator) can be 65% or more identical to one of the tracrRNA sequences set forth in SEQ ID NOs: 837-967, or a complement thereof, over a stretch of 8 or more contiguous nucleotides (e.g., 8 or more contiguous nucleotides, 10 or more contiguous nucleotides, 12 or more contiguous nucleotides, 15 or more contiguous nucleotides, or 20 or more contiguous nucleotides).

[0234] The duplex-forming segment of the activator (or the DNA encoding the duplex-forming segment of the activator) can be 70% or more identical to one of the tracrRNA sequences set forth in SEQ ID NOs: 837-967, or a complement thereof, over a stretch of 8 or more contiguous nucleotides (e.g., 8 or more contiguous nucleotides, 10 or more contiguous nucleotides, 12 or more contiguous nucleotides, 15 or more contiguous nucleotides, or 20 or more contiguous nucleotides).

[0235] The duplex-forming segment of the activator (or the DNA encoding the duplex-forming segment of the activator) can be 75% or more identical to one of the tracrRNA sequences set forth in SEQ ID NOs: 837-967, or a complement thereof, over a stretch of 8 or more contiguous nucleotides (e.g., 8 or more contiguous nucleotides, 10 or more contiguous nucleotides, 12 or more contiguous nucleotides, 15 or more contiguous nucleotides, or 20 or more contiguous nucleotides).

[0236] The duplex-forming segment of the activator (or the DNA encoding the duplex-forming segment of the activator) can be 80% or more identical to one of the tracrRNA sequences set forth in SEQ ID NOs: 837-967, or a complement thereof, over a stretch of 8 or more contiguous nucleotides (e.g., 8 or more contiguous nucleotides, 10 or more contiguous nucleotides, 12 or more contiguous nucleotides, 15 or more contiguous nucleotides, or 20 or more contiguous nucleotides).

[0237] The duplex-forming segment of the activator (or the DNA encoding the duplex-forming segment of the activator) can be 85% or more identical to one of the tracrRNA sequences set forth in SEQ ID NOs: 837-967, or a complement thereof, over a stretch of 8 or more contiguous nucleotides (e.g., 8 or more contiguous nucleotides, 10 or more contiguous nucleotides, 12 or more contiguous nucleotides, 15 or more contiguous nucleotides, or 20 or more contiguous nucleotides).

[0238] The duplex-forming segment of the activator (or the DNA encoding the duplex-forming segment of the activator) can be 90% or more identical to one of the tracrRNA sequences set forth in SEQ ID NOs: 837-967, or a complement thereof, over a stretch of 8 or more contiguous nucleotides (e.g., 8 or more contiguous nucleotides, 10 or more contiguous nucleotides, 12 or more contiguous nucleotides, 15 or more contiguous nucleotides, or 20 or more contiguous nucleotides).

[0239] The duplex-forming segment of the activator (or the DNA encoding the duplex-forming segment of the activator) can be 95% or more identical to one of the tracrRNA sequences set forth in SEQ ID NOs: 837-967, or a complement thereof, over a stretch of 8 or more contiguous nucleotides (e.g., 8 or more contiguous nucleotides, 10 or more contiguous nucleotides, 12 or more contiguous nucleotides, 15 or more contiguous nucleotides, or 20 or more contiguous nucleotides).

[0240] The duplex-forming segment of the activator (or the DNA encoding the duplex-forming segment of the activator) can be 98% or more identical to one of the tracrRNA sequences set forth in SEQ ID NOs: 837-967, or a complement thereof, over a stretch of 8 or more contiguous nucleotides (e.g., 8 or more contiguous nucleotides, 10 or more contiguous nucleotides, 12 or more contiguous nucleotides, 15 or more contiguous nucleotides, or 20 or more contiguous nucleotides).

[0241] The duplex-forming segment of the activator (or the DNA encoding the duplex-forming segment of the activator) can be 99% or more identical to one of the tracrRNA sequences set forth in SEQ ID NOs: 837-967, or a complement thereof, over a stretch of 8 or more contiguous nucleotides (e.g., 8 or more contiguous nucleotides, 10 or more contiguous nucleotides, 12 or more contiguous nucleotides, 15 or more contiguous nucleotides, or 20 or more contiguous nucleotides).

[0242] The duplex-forming segment of the activator (or the DNA encoding the duplex-forming segment of the activator) can be 100% identical to one of the tracrRNA sequences set forth in SEQ ID NOs: 837-967, or a complement thereof, over a stretch of 8 or more contiguous nucleotides (e.g., 8 or more contiguous nucleotides, 10 or more contiguous nucleotides, 12 or more contiguous nucleotides, 15 or more contiguous nucleotides, or 20 or more contiguous nucleotides).

[0243] In some embodiments, the duplex-forming segment of the targeter is 60% or more identical to one of the targeter (crRNA) sequences set forth in SEQ ID NOs: 974-1085, or a complement thereof, over a stretch of 8 or more contiguous nucleotides (e.g., 8 or more contiguous nucleotides, 10 or more contiguous nucleotides, 12 or more contiguous nucleotides, 15 or more contiguous nucleotides, or 20 or more contiguous nucleotides). For example, the duplex-forming segment of the targeter (or the DNA encoding the duplex-forming segment of the targeter) can be 65% or more identical to one of the crRNA sequences set forth in SEQ ID NOs: 974-1085, or a complement thereof, over a stretch of 8 or more contiguous nucleotides (e.g., 8 or more contiguous nucleotides, 10 or more contiguous nucleotides, 12 or more contiguous nucleotides, 15 or more contiguous nucleotides, or 20 or more contiguous nucleotides).

[0244] The duplex-forming segment of the targeter (or the DNA encoding the duplex-forming segment of the targeter) can be 70% or more identical to one of the crRNA sequences set forth in SEQ ID NOs: 974-1085, or a complement thereof, over a stretch of 8 or more contiguous nucleotides (e.g., 8 or more contiguous nucleotides, 10 or more contiguous nucleotides, 12 or more contiguous nucleotides, 15 or more contiguous nucleotides, or 20 or more contiguous nucleotides).

[0245] The duplex-forming segment of the targeter (or the DNA encoding the duplex-forming segment of the targeter) can be 75% or more identical to one of the crRNA sequences set forth in SEQ ID NOs: 974-1085, or a complement thereof, over a stretch of 8 or more contiguous nucleotides (e.g., 8 or more contiguous nucleotides, 10 or more contiguous nucleotides, 12 or more contiguous nucleotides, 15 or more contiguous nucleotides, or 20 or more contiguous nucleotides).

[0246] The duplex-forming segment of the targeter (or the DNA encoding the duplex-forming segment of the targeter) can be 80% or more identical to one of the crRNA sequences set forth in SEQ ID NOs: 974-1085, or a complement thereof, over a stretch of 8 or more contiguous nucleotides (e.g., 8 or more contiguous nucleotides, 10 or more contiguous nucleotides, 12 or more contiguous nucleotides, 15 or more contiguous nucleotides, or 20 or more contiguous nucleotides).

[0247] The duplex-forming segment of the targeter (or the DNA encoding the duplex-forming segment of the targeter) can be 85% or more identical to one of the crRNA sequences set forth in SEQ ID NOs: 974-1085, or a complement thereof, over a stretch of 8 or more contiguous nucleotides (e.g., 8 or more contiguous nucleotides, 10 or more contiguous nucleotides, 12 or more contiguous nucleotides, 15 or more contiguous nucleotides, or 20 or more contiguous nucleotides).

[0248] The duplex-forming segment of the targeter (or the DNA encoding the duplex-forming segment of the targeter) can be 90% or more identical to one of the crRNA sequences set forth in SEQ ID NOs: 974-1085, or a complement thereof, over a stretch of 8 or more contiguous nucleotides (e.g., 8 or more contiguous nucleotides, 10 or more contiguous nucleotides, 12 or more contiguous nucleotides, 15 or more contiguous nucleotides, or 20 or more contiguous nucleotides).

[0249] The duplex-forming segment of the targeter (or the DNA encoding the duplex-forming segment of the targeter) can be 95% or more identical to one of the crRNA sequences set forth in SEQ ID NOs: 974-1085, or a complement thereof, over a stretch of 8 or more contiguous nucleotides (e.g., 8 or more contiguous nucleotides, 10 or more contiguous nucleotides, 12 or more contiguous nucleotides, 15 or more contiguous nucleotides, or 20 or more contiguous nucleotides).

[0250] The duplex-forming segment of the targeter (or the DNA encoding the duplex-forming segment of the targeter) can be 98% or more identical to one of the crRNA sequences set forth in SEQ ID NOs: 974-1085, or a complement thereof, over a stretch of 8 or more contiguous nucleotides (e.g., 8 or more contiguous nucleotides, 10 or more contiguous nucleotides, 12 or more contiguous nucleotides, 15 or more contiguous nucleotides, or 20 or more contiguous nucleotides).

[0251] The duplex-forming segment of the targeter (or the DNA encoding the duplex-forming segment of the targeter) can be 99% or more identical to one of the crRNA sequences set forth in SEQ ID NOs: 974-1085, or a complement thereof, over a stretch of 8 or more contiguous nucleotides (e.g., 8 or more contiguous nucleotides, 10 or more contiguous nucleotides, 12 or more contiguous nucleotides, 15 or more contiguous nucleotides, or 20 or more contiguous nucleotides).

[0252] The duplex-forming segment of the targeter (or the DNA encoding the duplex-forming segment of the targeter) can be 100% identical to one of the crRNA sequences set forth in SEQ ID NOs: 974-1085, or a complement thereof, over a stretch of 8 or more contiguous nucleotides (e.g., 8 or more contiguous nucleotides, 10 or more contiguous nucleotides, 12 or more contiguous nucleotides, 15 or more contiguous nucleotides, or 20 or more contiguous nucleotides).

[0253] A dual guide nucleic acid (e.g., guide RNA) can be designed to allow for controlled (i.e., conditional) binding of a targeter with an activator. Because a dual guide nucleic acid (e.g., guide RNA) is not functional unless both the activator and the targeter are bound in a functional complex with Cas9, a dual guide nucleic acid (e.g., guide RNA) can be inducible (e.g., drug inducible) by rendering the binding between the activator and the targeter to be inducible. As one non-limiting example, RNA aptamers can be used to regulate (i.e., control) the binding of the activator with the targeter. Accordingly, the activator and/or the targeter can include an RNA aptamer sequence.

[0254] Aptamers (e.g., RNA aptamers) are known in the art and are generally a synthetic version of a riboswitch. The terms “RNA aptamer” and “riboswitch” are used interchangeably herein to encompass both synthetic and natural nucleic acid sequences that provide for inducible regulation of the structure (and therefore the availability of specific sequences) of the nucleic acid molecule (e.g., RNA, DNA/RNA hybrid, etc.) of which they are part. RNA aptamers usually comprise a sequence that folds into a particular structure (e.g., a hairpin), which specifically binds a particular drug (e.g., a small molecule). Binding of the drug causes a structural change in the folding of the RNA, which changes a feature of the nucleic acid of which the aptamer is a part. As non-limiting examples: (i) an activator with an aptamer may not be able to bind to the cognate targeter unless the aptamer is bound by the appropriate drug; (ii) a targeter with an aptamer may not be able to bind to the cognate activator unless the aptamer is bound by the appropriate drug; and (iii) a targeter and an activator, each comprising a different aptamer that binds a different drug, may not be able to bind to each other unless both drugs are present. As illustrated by these examples, a dual guide nucleic acid (e.g., guide RNA) can be designed to be inducible.

[0255] Examples of aptamers and riboswitches can be found, for example, in: Nakamura et al., Genes Cells. 2012 May; 17(5):344-64; Vavalle et al., Future Cardiol. 2012 May; 8(3):371-82; Citartan et al., Biosens Bioelectron. 2012 Apr. 15; 34(1):1-11; and Liberman et al., Wiley Interdiscip Rev RNA. 2012 May-June; 3(3):369-84; all of which are herein incorporated by reference in their entirety.

[0256] Non-limiting examples of nucleotide sequences that can be included in a dual guide nucleic acid (e.g., guide RNA) include either of the sequences set forth in SEQ ID NOs:837-967, or complements thereof pairing with any sequences set forth in SEQ ID NOs: 974-1085, or complements thereof that can hybridize to form a protein binding segment.

[0257] A subject single guide nucleic acid (e.g., guide RNA) comprises two stretches of nucleotides (much like a “targeter” and an “activator” of a dual guide nucleic acid) that are complementary to one another, hybridize to form the double stranded RNA duplex (dsRNA duplex) of the protein-binding segment (thus resulting in a stem-loop structure), and are covalently linked by intervening nucleotides (“linkers” or “linker nucleotides”). Thus, a subject single guide nucleic acid (e.g., a single guide RNA) can comprise a targeter and an activator, each having a duplex-forming segment, where the duplex-forming segments of the targeter and the activator hybridize with one another to form a dsRNA duplex. The targeter and the activator can be covalently linked via the 3′ end of the targeter and the 5′ end of the activator. Alternatively, targeter and the activator can be covalently linked via the 5′ end of the targeter and the 3′ end of the activator.

[0258] The linker of a single guide nucleic acid can have a length of from 3 nucleotides to 100 nucleotides. For example, the linker can have a length of from 3 nucleotides (nt) to 90 nt, from 3 nucleotides (nt) to 80 nt, from 3 nucleotides (nt) to 70 nt, from 3 nucleotides (nt) to 60 nt, from 3 nucleotides (nt) to 50 nt, from 3 nucleotides (nt) to 40 nt, from 3 nucleotides (nt) to 30 nt, from 3 nucleotides (nt) to 20 nt or from 3 nucleotides (nt) to 10 nt. For example, the linker can have a length of from 3 nt to 5 nt, from 5 nt to 10 nt, from 10 nt to 15 nt, from 15 nt to 20 nt, from 20 nt to 25 nt, from 25 nt to 30 nt, from 30 nt to 35 nt, from 35 nt to 40 nt, from 40 nt to 50 nt, from 50 nt to 60 nt, from 60 nt to 70 nt, from 70 nt to 80 nt, from 80 nt to 90 nt, or from 90 nt to 100 nt. In some embodiments, the linker of a single guide nucleic acid (e.g., guide RNA) is 4 nt.

[0259] An exemplary single guide nucleic acid (e.g., guide RNA) comprises two complementary stretches of nucleotides that hybridize to form a dsRNA duplex. In some embodiments, one of the two complementary stretches of nucleotides of the single guide nucleic acid (e.g., guide RNA) (or the DNA encoding the stretch) is 60% or more identical to one of the activator (tracrRNA) molecules set forth in SEQ ID NOs:837-967, or a complement thereof, over a stretch of 8 or more contiguous nucleotides (e.g., 8 or more contiguous nucleotides, 10 or more contiguous nucleotides, 12 or more contiguous nucleotides, 15 or more contiguous nucleotides, or 20 or more contiguous nucleotides). For example, one of the two complementary stretches of nucleotides of the single guide nucleic acid (e.g., guide RNA) (or the DNA encoding the stretch) is 65% or more identical, 70% or more identical, 75% or more identical, 80% or more identical, 85% or more identical, 90% or more identical, 95% or more identical, 98% or more identical, 99% or more identical or 100% identical to one of the tracrRNA sequences set forth in SEQ ID NOs: 837-967, or a complement thereof, over a stretch of 8 or more contiguous nucleotides (e.g., 8 or more contiguous nucleotides, 10 or more contiguous nucleotides, 12 or more contiguous nucleotides, 15 or more contiguous nucleotides, or 20 or more contiguous nucleotides).

[0260] In some embodiments, one of the two complementary stretches of nucleotides of the single guide nucleic acid (e.g., guide RNA) (or the DNA encoding the stretch) is 60% or more identical to one of the targeter (crRNA) sequences set forth in SEQ ID NOs:974-1085, or a complement thereof, over a stretch of 8 or more contiguous nucleotides (e.g., 8 or more contiguous nucleotides, 10 or more contiguous nucleotides, 12 or more contiguous nucleotides, 15 or more contiguous nucleotides, or 20 or more contiguous nucleotides). For example, one of the two complementary stretches of nucleotides of the single guide nucleic acid (e.g., guide RNA) (or the DNA encoding the stretch) is 65% or more identical, 70% or more identical, 75% or more identical, 80% or more identical, 85% or more identical, 90% or more identical, 95% or more identical, 98% or more identical, 99% or more identical or 100% identical to one of the crRNA sequences set forth in SEQ ID NOs: 974-1085, or a complement thereof, over a stretch of 8 or more contiguous nucleotides (e.g., 8 or more contiguous nucleotides, 10 or more contiguous nucleotides, 12 or more contiguous nucleotides, 15 or more contiguous nucleotides, or 20 or more contiguous nucleotides).

[0261] In some embodiments, one of the two complementary stretches of nucleotides of the single guide nucleic acid (e.g., guide RNA) (or the DNA encoding the stretch) is 60% or more identical to one of the targeter (crRNA) sequences or activator (tracrRNA) sequences set forth in SEQ ID NOs:837-967 and 974-1085, or a complement thereof, over a stretch of 8 or more contiguous nucleotides (e.g., 8 or more contiguous nucleotides, 10 or more contiguous nucleotides, 12 or more contiguous nucleotides, 15 or more contiguous nucleotides, or 20 or more contiguous nucleotides). For example, one of the two complementary stretches of nucleotides of the single guide nucleic acid (e.g., guide RNA) (or the DNA encoding the stretch) can be 65% or more identical to one of the sequences set forth in SEQ ID NOs: 837-967 and 974-1085, or a complement thereof, over a stretch of 8 or more contiguous nucleotides (e.g., 8 or more contiguous nucleotides, 10 or more contiguous nucleotides, 12 or more contiguous nucleotides, 15 or more contiguous nucleotides, or 20 or more contiguous nucleotides).

[0262] One of the two complementary stretches of nucleotides of the single guide nucleic acid (e.g., guide RNA) (or the DNA encoding the stretch) can be 70% or more identical to one of the sequences set forth in SEQ ID NOs: 837-967 and 974-1085, or a complement thereof, over a stretch of 8 or more contiguous nucleotides (e.g., 8 or more contiguous nucleotides, 10 or more contiguous nucleotides, 12 or more contiguous nucleotides, 15 or more contiguous nucleotides, or 20 or more contiguous nucleotides).

[0263] One of the two complementary stretches of nucleotides of the single guide nucleic acid (e.g., guide RNA) (or the DNA encoding the stretch) can be 75% or more identical to one of the sequences set forth in SEQ ID NOs: 837-967 and 974-1085, or a complement thereof, over a stretch of 8 or more contiguous nucleotides (e.g., 8 or more contiguous nucleotides, 10 or more contiguous nucleotides, 12 or more contiguous nucleotides, 15 or more contiguous nucleotides, or 20 or more contiguous nucleotides).

[0264] One of the two complementary stretches of nucleotides of the single guide nucleic acid (e.g., guide RNA) (or the DNA encoding the stretch) can be 80% or more identical to one of the sequences set forth in SEQ ID NOs: 837-967 and 974-1085, or a complement thereof, over a stretch of 8 or more contiguous nucleotides (e.g., 8 or more contiguous nucleotides, 10 or more contiguous nucleotides, 12 or more contiguous nucleotides, 15 or more contiguous nucleotides, or 20 or more contiguous nucleotides).

[0265] One of the two complementary stretches of nucleotides of the single guide nucleic acid (e.g., guide RNA) (or the DNA encoding the stretch) can be 85% or more identical to one of the sequences set forth in SEQ ID NOs: 837-967 and 974-1085, or a complement thereof, over a stretch of 8 or more contiguous nucleotides (e.g., 8 or more contiguous nucleotides, 10 or more contiguous nucleotides, 12 or more contiguous nucleotides, 15 or more contiguous nucleotides, or 20 or more contiguous nucleotides).

[0266] One of the two complementary stretches of nucleotides of the single guide nucleic acid (e.g., guide RNA) (or the DNA encoding the stretch) can be 90% or more identical to one of the sequences set forth in SEQ ID NOs: 837-967 and 974-1085, or a complement thereof, over a stretch of 8 or more contiguous nucleotides (e.g., 8 or more contiguous nucleotides, 10 or more contiguous nucleotides, 12 or more contiguous nucleotides, 15 or more contiguous nucleotides, or 20 or more contiguous nucleotides).

[0267] One of the two complementary stretches of nucleotides of the single guide nucleic acid (e.g., guide RNA) (or the DNA encoding the stretch) can be 95% or more identical to one of the sequences set forth in SEQ ID NOs: 837-967 and 974-1085, or a complement thereof, over a stretch of 8 or more contiguous nucleotides (e.g., 8 or more contiguous nucleotides, 10 or more contiguous nucleotides, 12 or more contiguous nucleotides, 15 or more contiguous nucleotides, or 20 or more contiguous nucleotides).

[0268] One of the two complementary stretches of nucleotides of the single guide nucleic acid (e.g., guide RNA) (or the DNA encoding the stretch) can be 98% or more identical to one of the sequences set forth in SEQ ID NOs: 837-967 and 974-1085, or a complement thereof, over a stretch of 8 or more contiguous nucleotides (e.g., 8 or more contiguous nucleotides, 10 or more contiguous nucleotides, 12 or more contiguous nucleotides, 15 or more contiguous nucleotides, or 20 or more contiguous nucleotides).

[0269] One of the two complementary stretches of nucleotides of the single guide nucleic acid (e.g., guide RNA) (or the DNA encoding the stretch) can be 99% or more identical to one of the sequences set forth in SEQ ID NOs: 837-967 and 974-1085, or a complement thereof, over a stretch of 8 or more contiguous nucleotides (e.g., 8 or more contiguous nucleotides, 10 or more contiguous nucleotides, 12 or more contiguous nucleotides, 15 or more contiguous nucleotides, or 20 or more contiguous nucleotides).

[0270] One of the two complementary stretches of nucleotides of the single guide nucleic acid (e.g., guide RNA) (or the DNA encoding the stretch) can be 100% identical to one of the sequences set forth in SEQ ID NOs: 837-967 and 974-1085, or a complement thereof, over a stretch of 8 or more contiguous nucleotides (e.g., 8 or more contiguous nucleotides, 10 or more contiguous nucleotides, 12 or more contiguous nucleotides, 15 or more contiguous nucleotides, or 20 or more contiguous nucleotides).

[0271] Appropriate cognate pairs of targeters and activators can be routinely determined for SEQ ID NOs: 837-967 and 974-1085 by taking into account the species name and base-pairing (for the dsRNA duplex of the protein-binding domain) Any activator/targeter pair can be used as part of dual guide nucleic acid (e.g., guide RNA) or as part of a single guide nucleic acid (e.g., guide RNA).

[0272] In some cases, an activator (e.g., a trRNA, trRNA-like molecule, etc.) of a dual guide nucleic acid (e.g., guide RNA) (e.g., a dual guide RNA) or a single guide nucleic acid (e.g., guide RNA) (e.g., a single guide RNA) includes a stretch of nucleotides with 60% or more sequence identity (e.g., 65% or more, 70% or more, 75% or more, 80% or more, 85% or more, 90% or more, 95% or more, 98% or more, or 100% sequence identity) with an activator (tracrRNA) molecule set forth in any one of SEQ ID NOs:837-967, or a complement thereof. In some cases, an activator (e.g., a trRNA, trRNA-like molecule, etc.) of a dual guide nucleic acid (e.g., guide RNA) (e.g., a dual guide RNA) or a single guide nucleic acid (e.g., a single guide RNA) includes a stretch of nucleotides with 70% or more sequence identity with an activator (tracrRNA) molecule set forth in any one of SEQ ID NOs: 837-967, or a complement thereof. In some cases, an activator (e.g., a trRNA, trRNA-like molecule, etc.) of a dual guide nucleic acid (e.g., a dual guide RNA) or a single guide nucleic acid (e.g., a single guide RNA) includes a stretch of nucleotides with 75% or more sequence identity with an activator (tracrRNA) molecule set forth in any one of SEQ ID NOs:837-967, or a complement thereof. In some cases, an activator (e.g., a trRNA, trRNA-like molecule, etc.) of a dual guide nucleic acid (e.g., a dual guide RNA) or a single guide nucleic acid (e.g., a single guide RNA) includes a stretch of nucleotides with 80% or more sequence identity with an activator (tracrRNA) molecule set forth in any one of SEQ ID NOs: 837-967, or a complement thereof. In some cases, an activator (e.g., a trRNA, trRNA-like molecule, etc.) of a dual guide nucleic acid (e.g., a dual guide RNA) or a single guide nucleic acid (e.g., a single guide RNA) includes a stretch of nucleotides with 85% or more sequence identity with an activator (tracrRNA) molecule set forth in any one of SEQ ID NOs: 837-967, or a complement thereof. In some cases, an activator (e.g., a trRNA, trRNA-like molecule, etc.) of a dual guide nucleic acid (e.g., a dual guide RNA) or a single guide nucleic acid (e.g., a single guide RNA) includes a stretch of nucleotides with 90% or more sequence identity with an activator (tracrRNA) molecule set forth in any one of SEQ ID NOs: 837-967, or a complement thereof. In some cases, an activator (e.g., a trRNA, trRNA-like molecule, etc.) of a dual guide nucleic acid (e.g., a dual guide RNA) or a single guide nucleic acid (e.g., a single guide RNA) includes a stretch of nucleotides with 95% or more sequence identity with an activator (tracrRNA) molecule set forth in any one of SEQ ID NOs: 837-967, or a complement thereof. In some cases, an activator (e.g., a trRNA, trRNA-like molecule, etc.) of a dual guide nucleic acid (e.g., a dual guide RNA) or a single guide nucleic acid (e.g., a single guide RNA) includes a stretch of nucleotides with 98% or more sequence identity with an activator (tracrRNA) molecule set forth in any one of SEQ ID NOs: 837-967, or a complement thereof. In some cases, an activator (e.g., a trRNA, trRNA-like molecule, etc.) of a dual guide nucleic acid (e.g., a dual guide RNA) or a single guide nucleic acid (e.g., a single guide RNA) includes a stretch of nucleotides with 100% sequence identity with an activator (tracrRNA) molecule set forth in any one of SEQ ID NOs: 837-967, or a complement thereof.

[0273] In some cases, an activator (e.g., a trRNA, trRNA-like molecule, etc.) of a dual guide nucleic acid (e.g., a dual guide RNA) or a single guide nucleic acid (e.g., a single guide RNA) includes 30 or more nucleotides (nt) (e.g., 40 or more, 50 or more, 60 or more, 70 or more, 75 or more nt). In some cases, an activator (e.g., a trRNA, trRNA-like molecule, etc.) of a dual guide nucleic acid (e.g., a dual guide RNA) or a single guide nucleic acid (e.g., a single guide RNA) has a length in a range of from 30 to 200 nucleotides (nt) (e.g., 40 to 200 nucleotides, 50 to 200 nucleotides, 60 to 200 nucleotides, 65 to 200 nucleotides, 70 to 200 nucleotides, 75 to 200 nucleotides, 40 to 150 nucleotides, 50 to 150 nucleotides, 60 to 150 nucleotides, 65 to 150 nucleotides, 70 to 150 nucleotides, 75 to 150 nucleotides, 40 to 100 nucleotides, 50 to 100 nucleotides, 60 to 100 nucleotides, 65 to 100 nucleotides, 70 to 100 nucleotides, or 75 to 100 nucleotides).

[0274] The protein-binding segment can have a length of from 10 nucleotides to 100 nucleotides. For example, the protein-binding segment can have a length of from 15 nucleotides (nt) to 80 nt, from 15 nt to 50 nt, from 15 nt to 40 nt, from 15 nt to 30 nt or from 15 nt to 25 nt.

[0275] Also with regard to both a subject single guide nucleic acid (e.g., single guide RNA) and to a subject dual guide nucleic acid (e.g., dual guide RNA), the dsRNA duplex of the protein-binding segment can have a length from 6 base pairs (bp) to 50 bp. For example, the dsRNA duplex of the protein-binding segment can have a length from 6 bp to 40 bp, from 6 bp to 30 bp, from 6 bp to 25 bp, from 6 bp to 20 bp, from 6 bp to 15 bp, from 8 bp to 40 bp, from 8 bp to 30 bp, from 8 bp to 25 bp, from 8 bp to 20 bp or from 8 bp to 15 bp. For example, the dsRNA duplex of the protein-binding segment can have a length from from 8 bp to 10 bp, from 10 bp to 15 bp, from 15 bp to 18 bp, from 18 bp to 20 bp, from 20 bp to 25 bp, from 25 bp to 30 bp, from 30 bp to 35 bp, from 35 bp to 40 bp, or from 40 bp to 50 bp. In some embodiments, the dsRNA duplex of the protein-binding segment has a length of 36 base pairs. In some embodiments, the dsRNA duplex of the protein-binding segment has a length of 12 base pairs. In some embodiments, the dsRNA duplex of the protein-binding segment has a length of 16 base pairs. In some embodiments, the dsRNA duplex of the protein-binding segment has a length of 17 base pairs. The percent complementarity between the nucleotide sequences that hybridize to form the dsRNA duplex of the protein-binding segment can be 60% or more. For example, the percent complementarity between the nucleotide sequences that hybridize to form the dsRNA duplex of the protein-binding segment can be 65% or more, 70% or more, 75% or more, 80% or more, 85% or more, 90% or more, 95% or more, 98% or more, or 99% or more (e.g., in some cases, there are a some nucleotides that do not hybridize and therefore create a bulge within the dsRNA duplex. In some cases, the percent complementarity between the nucleotide sequences that hybridize to form the dsRNA duplex of the protein-binding segment is 100%.

[0276] Hybrid Guide Nucleic Acids

[0277] In some cases, a guide nucleic acid is two RNA molecules (dual guide RNA). In some cases, a guide nucleic acid is one RNA molecule (single guide RNA). In some cases, a guide nucleic acid is a DNA/RNA hybrid molecule. In such cases, the protein-binding segment of the guide nucleic acid is RNA and forms an RNA duplex. Thus, the duplex-forming segments of the activator and the targeter is RNA. However, the targeting segment of a guide nucleic acid can be DNA. Thus, if a DNA/RNA hybrid guide nucleic acid is a dual guide nucleic acid, the “targeter” molecule and be a hybrid molecule (e.g., the targeting segment can be DNA and the duplex-forming segment can be RNA). In such cases, the duplex-forming segment of the “activator” molecule can be RNA (e.g., in order to form an RNA-duplex with the duplex-forming segment of the targeter molecule), while nucleotides of the “activator” molecule that are outside of the duplex-forming segment can be DNA (in which case the activator molecule is a hybrid DNA/RNA molecule) or can be RNA (in which case the activator molecule is RNA). If a DNA/RNA hybrid guide nucleic acid is a single guide nucleic acid, then the targeting segment can be DNA, the duplex-forming segments (which make up the protein-binding segment of the single guide nucleic acid) can be RNA, and nucleotides outside of the targeting and duplex-forming segments can be RNA or DNA.

[0278] A DNA/RNA hybrid guide nucleic can be useful in some cases, for example, when a target nucleic acid is an RNA. Cas9 normally associates with a guide RNA that hybridizes with a target DNA, thus forming a DNA-RNA duplex at the target site. Therefore, when the target nucleic acid is an RNA, it is sometimes advantageous to recapitulate a DNA-RNA duplex at the target site by using a targeting segment (of the guide nucleic acid) that is DNA instead of RNA. However, because the protein-binding segment of a guide nucleic acid is an RNA-duplex, the targeter molecule is DNA in the targeting segment and RNA in the duplex-forming segment. Hybrid guide nucleic acids can bias Cas9 binding to single stranded target nucleic acids relative to double stranded target nucleic acids.

[0279] Exemplary Guide Nucleic Acids

[0280] In some embodiments, a suitable guide nucleic acid includes two separate RNA polynucleotide molecules. In some cases, the first of the two separate RNA polynucleotide molecules (the activator) comprises a nucleotide sequence having 60% or more (e.g., 65% or more, 70% or more, 75% or more, 80% or more, 85% or more, 90% or more, 95% or more, 98% or more, 99% or more, or 100%) nucleotide sequence identity over a stretch of 8 or more contiguous nucleotides (e.g., 8 or more contiguous nucleotides, 10 or more contiguous nucleotides, 12 or more contiguous nucleotides, 15 or more contiguous nucleotides, or 20 or more contiguous nucleotides) to any one of the nucleotide sequences set forth in SEQ ID NOs:837-967 and 974-1085, or a complement thereof. In some cases, the second of the two separate RNA polynucleotide molecules (the targeter) comprises a nucleotide sequence having 60% or more (e.g., 65% or more, 70% or more, 75% or more, 80% or more, 85% or more, 90% or more, 95% or more, 98% or more, 99% or more, or 100%) nucleotide sequence identity over a stretch of 8 or more contiguous nucleotides (e.g., 8 or more contiguous nucleotides, 10 or more contiguous nucleotides, 12 or more contiguous nucleotides, 15 or more contiguous nucleotides, or 20 or more contiguous nucleotides) to any one of the nucleotide sequences set forth in SEQ ID NOs: 837-967 and 974-1085, or a complement thereof.

[0281] In some embodiments, a suitable guide nucleic acid is a single RNA polynucleotide and comprises a first nucleotide sequence having 60% or more (e.g., 65% or more, 70% or more, 75% or more, 80% or more, 85% or more, 90% or more, 95% or more, 98% or more, 99% or more, or 100%) nucleotide sequence identity over a stretch of 8 or more contiguous nucleotides (e.g., 8 or more contiguous nucleotides, 10 or more contiguous nucleotides, 12 or more contiguous nucleotides, 15 or more contiguous nucleotides, or 20 or more contiguous nucleotides) to any one of the nucleotide sequences set forth in SEQ ID NOs: 837-967 and 974-1085 and a second nucleotide sequence having 60% or more (e.g., 65% or more, 70% or more, 75% or more, 80% or more, 85% or more, 90% or more, 95% or more, 98% or more, 99% or more, or 100%) nucleotide sequence identity over a stretch of 8 or more contiguous nucleotides (e.g., 8 or more contiguous nucleotides, 10 or more contiguous nucleotides, 12 or more contiguous nucleotides, 15 or more contiguous nucleotides, or 20 or more contiguous nucleotides) to any one of the nucleotide sequences set forth in SEQ ID NOs: 837-967 and 974-1085.

[0282] Additional Sequences

[0283] In some embodiments, a guide nucleic acid (e.g., guide RNA) includes an additional segment or segments (in some cases at the 5′ end, in some cases the 3′ end, in some cases at either the 5′ or 3′ end, in some cases embedded within the sequence (i.e., not at the 5′ and/or 3′ end), in some cases at both the 5′ end and the 3′ end, in some cases embedded and at the 5′ end and/or the 3′ end, etc). For example, a suitable additional segment can include a 5′ cap (e.g., a 7-methylguanylate cap (m⁷G)); a 3′ polyadenylated tail (i.e., a 3′ poly(A) tail); a ribozyme sequence (e.g. to allow for self-cleavage of a guide nucleic acid (or component of a guide nucleic acid, e.g., a targeter, an activator, etc.); a riboswitch sequence (e.g., to allow for regulated stability and/or regulated accessibility by proteins and protein complexes); a sequence that forms a dsRNA duplex (i.e., a hairpin)); a sequence that targets an RNA to a subcellular location (e.g., nucleus, mitochondria, chloroplasts, and the like); a modification or sequence that provides for tracking (e.g., a direct label (e.g., direct conjugation to a fluorescent molecule (i.e., fluorescent dye)), conjugation to a moiety that facilitates fluorescent detection, a sequence that allows for fluorescent detection; a modification or sequence that provides a binding site for proteins (e.g., proteins that act on DNA, including transcriptional activators, transcriptional repressors, DNA methyltransferases, DNA demethylases, histone acetyltransferases, histone deacetylases, proteins that bind RNA (e.g., RNA aptamers), labeled proteins, fluorescently labeled proteins, and the like); a modification or sequence that provides for increased, decreased, and/or controllable stability; and combinations thereof.

### Cpf1 Guide RNA

[0284] A Cpf1 guide RNA can have a total length of from 30 nucleotides (nt) to 100 nt, e.g., from 30 nt to 40 nt, from 40 nt to 45 nt, from 45 nt to 50 nt, from 50 nt to 60 nt, from 60 nt to 70 nt, from 70 nt to 80 nt, from 80 nt to 90 nt, or from 90 nt to 100 nt. In some cases, a Cpf1 guide RNA has a total length of 35 nt, 36 nt, 37 nt, 38 nt, 39 nt, 40 nt, 41 nt, 42 nt, 43 nt, 44 nt, 45 nt, 46 nt, 47 nt, 48 nt, 49 nt, or 50 nt.

[0285] A Cpf1 guide RNA can include a target nucleic acid-binding segment and a duplex-forming segment.

[0286] The target nucleic acid-binding segment of a Cpf1 guide RNA can have a length of from 15 nt to 30 nt, e.g., 15 nt, 16 nt, 17 nt, 18 nt, 19 nt, 20 nt, 21 nt, 22 nt, 23 nt, 24 nt, 25 nt, 26 nt, 27 nt, 28 nt, 29 nt, or 30 nt. In some cases, the target nucleic acid-binding segment has a length of 23 nt. In some cases, the target nucleic acid-binding segment has a length of 24 nt. In some cases, the target nucleic acid-binding segment has a length of 25 nt.

[0287] The target nucleic acid-binding segment of a Cpf1 guide RNA can have 100% complementarity with a corresponding length of target nucleic acid sequence. The targeting segment can have less than 100% complementarity with a corresponding length of target nucleic acid sequence. For example, the target nucleic acid binding segment of a Cpf1 guide RNA can have 1, 2, 3, 4, or 5 nucleotides that are not complementary to the target nucleic acid sequence. For example, in some cases, where a target nucleic acid-binding segment has a length of 25 nucleotides, and the target nucleic acid sequence has a length of 25 nucleotides, in some cases, the target nucleic acid-binding segment has 100% complementarity to the target nucleic acid sequence. As another example, in some cases, where a target nucleic acid-binding segment has a length of 25 nucleotides, and the target nucleic acid sequence has a length of 25 nucleotides, in some cases, the target nucleic acid-binding segment has 1 non-complementary nucleotide and 24 complementary nucleotides with the target nucleic acid sequence. As another example, in some cases, where a target nucleic acid-binding segment has a length of 25 nucleotides, and the target nucleic acid sequence has a length of 25 nucleotides, in some cases, the target nucleic acid-binding segment has 2 non-complementary nucleotide and 23 complementary nucleotides with the target nucleic acid sequence.

[0288] The duplex-forming segment of a Cpf1 guide RNA can have a length of from 15 nt to 25 nt, e.g., 15 nt, 16 nt, 17 nt, 18 nt, 19 nt, 20 nt, 21 nt, 22 nt, 23 nt, 24 nt, or 25 nt.

[0289] In some cases, the duplex-forming segment of a Cpf1 guide RNA can comprise the nucleotide sequence 5′-AAUUUCUACUGUUGUAGAU-3′ (SEQ ID NO: 1139).

### Polycation-Based Endosomal Escape Polymers

[0290] Polymers suitable for inclusion in a complex of the present disclosure include polycation-containing polymers that provide for enhanced escape from an endosomal compartment in a eukaryotic cell. Such polymers are referred to herein as “endosomal disruptive polymers.” A nucleic acid-conjugated colloidal metal nanoparticle is complexed with a Type II CRISPR system comprising a Cas9 polypeptide and a guide RNA, and the nucleic acid-conjugated colloidal metal nanoparticle/Type II CRISPR system complex is encapsulated in an endosomal disruptive polymer. In some cases, a Type II CRISPR system comprises: i) a Cas9 polypeptide; ii) a guide RNA; and iii) a donor template polynucleotide; and the nucleic acid-conjugated colloidal metal nanoparticle/Type II CRISPR system complex is encapsulated in an endosomal disruptive polymer.

[0291] In some cases, an endosomal disruptive polymer suitable for inclusion in a complex of the present disclosure is a cationic polymer selected from the group consisting of polyethylene imine, poly(arginine), poly(lysine), poly(histidine), poly-[2-{(2-aminoethyl)amino}-ethyl-aspartamide] (pAsp(DET)), a block co-polymer of poly(ethylene glycol) (PEG) and poly(arginine), a block co-polymer of PEG and poly(lysine), and a block co-polymer of PEG and poly{N—[N-(2-aminoethyl)-2-aminoethyl]aspartamide} (PEG-pAsp(DET)). In some cases, a complex of the present disclosure comprises poly{N—[N-(2-aminoethyl)-2-aminoethyl]aspartamide} (PEG-pAsp(DET)). In some cases, polyethylenimine (PEI) is used.

[0292] In some cases, a complex of the present disclosure further includes a silicate in the portion of the complex that encapsulates the nucleic acid-conjugated colloidal metal nanoparticle/Type II CRISPR system complex. In some cases, a nucleic acid-conjugated colloidal metal nanoparticle/Type II CRISPR system complex is encapsulated in alternating layers of an endosomal disruptive polymer and a silicate. In some cases, a nucleic acid-conjugated colloidal metal nanoparticle/Type II CRISPR system complex is encapsulated in a single layer of an endosomal disruptive polymer. In some cases, a nucleic acid-conjugated colloidal metal nanoparticle/Type II CRISPR system complex is encapsulated in two or more layer of an endosomal disruptive polymer.

### Donor Template DNA

[0293] As noted above, in some cases, a complex of the present disclosure comprises: a) a nanoparticle-nucleic acid conjugate; b) a Type II or a Type V CRISPR system comprising a site-directed DNA-modifying polypeptide and a guide RNA; and c) a polycation-based endosomal escape polymer, and may optionally also comprise a donor polynucleotide (e.g., a donor DNA template).

[0294] By a “donor sequence” or “donor polynucleotide” or “donor DNA template” it is meant a nucleic acid sequence to be inserted at the cleavage site induced by a site-directed modifying polypeptide (e.g., a Cas9 polypeptide or a Cpf1 polypeptide). The donor polynucleotide will contain sufficient homology to a target genomic sequence at the cleavage site, e.g. 70%, 80%, 85%, 90%, 95%, or 100% homology with the nucleotide sequences flanking the cleavage site, e.g. within about 50 bases or less of the cleavage site, e.g. within about 30 bases, within about 15 bases, within about 10 bases, within about 5 bases, or immediately flanking the cleavage site, to support homology-directed repair between it and the genomic sequence to which it bears homology. Approximately 25, 50, 100, or 200 nucleotides, or more than 200 nucleotides, of sequence homology between a donor and a genomic sequence (or any integral value between 10 and 200 nucleotides, or more) will support homology-directed repair. Donor sequences can be of any length, e.g. 10 nucleotides or more, 50 nucleotides or more, 100 nucleotides or more, 250 nucleotides or more, 500 nucleotides or more, 1000 nucleotides or more, 5000 nucleotides or more, etc.

[0295] The donor sequence is typically not identical to the genomic sequence that it replaces. Rather, the donor sequence may contain one or more single base changes, insertions, deletions, inversions or rearrangements with respect to the genomic sequence, so long as sufficient homology is present to support homology-directed repair. In some embodiments, the donor sequence comprises a non-homologous sequence flanked by two regions of homology, such that homology-directed repair between the target DNA region and the two flanking sequences results in insertion of the non-homologous sequence at the target region. Donor sequences may also comprise a vector backbone containing sequences that are not homologous to the DNA region of interest and that are not intended for insertion into the DNA region of interest. Generally, the homologous region(s) of a donor sequence will have at least 50% sequence identity to a genomic sequence with which recombination is desired. In certain embodiments, 60%, 70%, 80%, 90%, 95%, 98%, 99%, or 99.9% sequence identity is present. Any value between 1% and 100% sequence identity can be present, depending upon the length of the donor polynucleotide.

[0296] The donor sequence may comprise certain sequence differences as compared to the genomic sequence, e.g. restriction sites, nucleotide polymorphisms, selectable markers (e.g., drug resistance genes, fluorescent proteins, enzymes etc.), etc., which may be used to assess for successful insertion of the donor sequence at the cleavage site or in some cases may be used for other purposes (e.g., to signify expression at the targeted genomic locus). In some cases, if located in a coding region, such nucleotide sequence differences will not change the amino acid sequence, or will make silent amino acid changes (i.e., changes which do not affect the structure or function of the protein). Alternatively, these sequences differences may include flanking recombination sequences such as FLPs, loxP sequences, or the like, that can be activated at a later time for removal of the marker sequence.

[0297] The donor sequence may be provided to the cell as single-stranded DNA, single-stranded RNA, double-stranded DNA, or double-stranded RNA. It may be introduced into a cell in linear or circular form. If introduced in linear form, the ends of the donor sequence may be protected (e.g., from exonucleolytic degradation) by methods known to those of skill in the art. For example, one or more dideoxynucleotide residues are added to the 3′ terminus of a linear molecule and/or self-complementary oligonucleotides are ligated to one or both ends. See, for example, Chang et al. (1987) Proc. Natl. Acad Sci USA 84:4959-4963; Nehls et al. (1996) Science 272:886-889. Additional methods for protecting exogenous polynucleotides from degradation include, but are not limited to, addition of terminal amino group(s) and the use of modified internucleotide linkages such as, for example, phosphorothioates, phosphoramidates, and O-methyl ribose or deoxyribose residues. As an alternative to protecting the termini of a linear donor sequence, additional lengths of sequence may be included outside of the regions of homology that can be degraded without impacting recombination. A donor sequence can be introduced into a cell as part of a vector molecule having additional sequences such as, for example, replication origins, promoters and genes encoding antibiotic resistance. Moreover, donor sequences can be introduced as naked nucleic acid, as nucleic acid complexed with an agent such as a liposome or poloxamer, or can be delivered by viruses (e.g., adenovirus, AAV), as described above for nucleic acids encoding a Cas9 guide RNA and/or a Cas9 fusion polypeptide and/or donor polynucleotide.

### Methods

[0298] The present disclosure provides methods of making a complex of the present disclosure. The present disclosure provides methods of using a complex of the present disclosure. A complex of the present disclosure can be used to modify a target nucleic acid in a eukaryotic cell. A complex of the present disclosure can be used to modulate transcription of a target nucleic acid in a eukaryotic cell.

### Method of Making a Complex

[0299] Further aspects of the present disclosure include a method of making a complex of the present disclosure. In some cases, the nanoparticle is functionalized with a sulfur (e.g., a thiol moiety), and the nucleic acid is attached to the nanoparticle via the sulfur (e.g., via the thiol moiety). Once the nucleic acid is attached to the nanoparticle, the Type II site directed DNA modifying polypeptide (e.g., Cas9 polypeptide) or the Type V site directed DNA modifying polypeptide (e.g., Cpf1 polypeptide) and the guide RNA are contacted with the nucleic acid-nanoparticle conjugate, to form a complex of the present disclosure.

[0300] An implementation of the method is described with reference to FIG. 1A. The method may include loading a gold nanoparticle (GNP) conjugated to DNA via a thiol group (120) with a Cas9/gRNA ribonucleoprotein (RNP) (125) to produce a Cas9 RNP-DNA-GNP complex (140).

[0301] The GNP-DNA conjugate may be produced by reacting a GNP (100) with a DNA-thiol. The GNP may have a diameter of about 30 nm.

[0302] In some cases, the GNP-DNA conjugate (120) is hybridized with a donor single-stranded DNA before loading the Cas9 RNP.

[0303] After forming the Cas9 RNP-DNA-GNP complex (140), the complex may be coated with silicate and an endosomal disruptive polymer (145), such as a PAsp(DET) polymer to form an encapsulated Cas9 RNP-DNA-GNP complex (160).

### Method of Binding a Target Nucleic Acid and Methods of Modifying a Target Nucleic Acid

[0304] The present disclosure provides methods of binding a target nucleic acid present in a eukaryotic cell. The methods generally involve contacting a eukaryotic cell comprising a target nucleic acid with a complex of the present disclosure, wherein the complex enters the cell, and wherein the guide RNA and site-directed DNA-modifying polypeptide (e.g., a Cas9 polypeptide or a Cpf1 polypeptide) (and, if present, a donor polynucleotide) are released from the complex in an endosome in the cell. Once released from the endosome, the guide RNA and site-directed DNA-modifying polypeptide (e.g., a Cas9 polypeptide or a Cpf1 polypeptide) (and, if present, a donor polynucleotide) can bind a target nucleic acid, e.g., where the target nucleic acid is in the nucleus, in a mitochondrion, or in the cytoplasm. In some case, the cell is in vitro. In some cases, the cell is in vivo. In some cases, the cell is present in a multicellular organism. In some cases, where the complex comprises a dead Cas9 polypeptide, the dead Cas9 polypeptide modulates transcription from the target nucleic acid. In some cases, e.g., where the complex comprises a Cas9 fusion polypeptide, the Cas9 fusion polypeptide modifies the target nucleic acid. In some cases, where the complex comprises a Cas9 polypeptide, the Cas9 polypeptide cleaves the target nucleic acid. In some cases, where the complex comprises a Cpf1 polypeptide, the Cpf1 polypeptide cleaves the target nucleic acid.

[0305] As noted above, in some cases, the complex comprises a donor template polynucleotide. In these instances, the method comprises contacting the target nucleic acid with the donor template polynucleotide. In some cases, the donor polynucleotide (e.g., a DNA repair template) replaces at least a portion of a target nucleic acid, e.g., to repair a defect in the target nucleic acid.

[0306] The present disclosure provides methods of genetically modifying a eukaryotic target cell. The methods generally involve contacting the eukaryotic target cell with a complex of the present disclosure. The complex enters the cell, and the guide RNA, site-directed DNA-modifying polypeptide (e.g., a Cas9 polypeptide or a Cpf1 polypeptide), and donor polynucleotide (if present) are released from the complex in an endosome in the cell. Once released from the endosome, the guide RNA and site-directed DNA-modifying polypeptide (e.g., a Cas9 polypeptide or a Cpf1 polypeptide) (and, if present, a donor polynucleotide) can bind a target nucleic acid, e.g., where the target nucleic acid is in the nucleus, in a mitochondrion, or in the cytoplasm. In some case, the cell is in vitro. In some cases, the cell is in vivo. In some cases, the cell is present in a multicellular organism. In some cases, the target cell is an insect cell. In some cases, the target cell is an arachnid cell. In some cases, the target cell is a cell of or in an invertebrate. In some cases, the target cell is a protozoan cell. In some cases, the target cell is a plant cell. In some cases, the target cell is present in a plant or a plant tissue. In some cases, the target cell is an animal cell. In some cases, the target cell is present in an animal, e g, a human, or a non-human animal. In some cases, the target cell is a mammalian cell. In some cases, the target cell is present in a mammal, e g, in a human or a non-human mammal. In some cases, is a myoblast, a neuron, a chondrocyte, a lymphocyte, an epithelial cell, an adipocyte, or a keratinocyte. In some cases, the target cell is pluripotent cell. In some cases, the target cell is a stem cell, e.g., an embryonic stem cell, a neuronal stem cell, a hematopoietic stem cell, an adult stem cell, an induced stem cell, etc.

[0307] A method of the present disclosure can be used in combination with one or more other methods of delivering a Type II or Type V CRISPR system to a eukaryotic cell. For example, in some cases, a method of the present disclosure for genetically modifying a eukaryotic target cell comprises administering to an individual in need thereof a complex of the present disclosure; and administering a recombinant vector comprising a nucleotide sequence encoding one or more components of a Type II or Type V CRISPR system (e.g., a nucleotide sequence encoding a Cas9 polypeptide; a nucleotide sequence encoding a Cpf1 polypeptide; a nucleotide sequence encoding a guide RNA). As another example, in some cases, a method of the present disclosure for genetically modifying a eukaryotic target cell comprises administering to an individual in need thereof a complex of the present disclosure; and administering an RNA comprising a nucleotide sequence encoding one or more components of a Type II or Type V CRISPR system (e.g., a nucleotide sequence encoding a Cas9 polypeptide; a nucleotide sequence encoding a Cpf1 polypeptide; a nucleotide sequence encoding a guide RNA).

### Target Cells of Interest

[0308] In some of the above applications, the subject methods may be employed to induce target nucleic acid cleavage, target nucleic acid modification, and/or to bind target nucleic acids (e.g., for visualization, for collecting and/or analyzing, etc.) in mitotic or post-mitotic cells in vivo and/or ex vivo and/or in vitro (e.g., to disrupt production of a protein encoded by a targeted mRNA). Because the guide nucleic acid provides specificity by hybridizing to target nucleic acid, a mitotic and/or post-mitotic cell of interest in the disclosed methods may include a cell from any eukaryotic cell or organism (e.g. a cell of a single-cell eukaryotic organism, a plant cell, an algal cell, e.g., Botryococcus braunii, Chlamydomonas reinhardtii, Nannochloropsis gaditana, Chlorella pyrenoidosa, Sargassum patens, C. agardh, and the like, a fungal cell (e.g., a yeast cell), an animal cell, a cell from an invertebrate animal (e.g. fruit fly, cnidarian, echinoderm, nematode, an insect, an arachnid, etc.), a cell from a vertebrate animal (e.g., fish, amphibian, reptile, bird, mammal), a cell from a mammal, a cell from a rodent, a cell from a human, etc.), or a protozoan cell.

[0309] Any type of cell may be of interest (e.g. a stem cell, e.g. an embryonic stem (ES) cell, an induced pluripotent stem (iPS) cell, a germ cell; a somatic cell, e.g. a fibroblast, a hematopoietic cell, a neuron, a muscle cell, a bone cell, a hepatocyte, a pancreatic cell; an in vitro or in vivo embryonic cell of an embryo at any stage, e.g., a 1-cell, 2-cell, 4-cell, 8-cell, etc. stage zebrafish embryo; etc.). Cells may be from established cell lines or they may be primary cells, where “primary cells”, “primary cell lines”, and “primary cultures” are used interchangeably herein to refer to cells and cells cultures that have been derived from a subject and allowed to grow in vitro for a limited number of passages, i.e. splittings, of the culture. For example, primary cultures are cultures that may have been passaged 0 times, 1 time, 2 times, 4 times, 5 times, 10 times, or 15 times, but not enough times go through the crisis stage. In some cases, the primary cell lines are maintained for fewer than 10 passages in vitro. Target cells are in some cases unicellular organisms, or are grown in culture.

[0310] If the cells are primary cells, they may be harvest from an individual by any convenient method. For example, leukocytes may be conveniently harvested by apheresis, leukocytapheresis, density gradient separation, etc., while cells from tissues such as skin, muscle, bone marrow, spleen, liver, pancreas, lung, intestine, stomach, etc. are most conveniently harvested by biopsy. An appropriate solution may be used for dispersion or suspension of the harvested cells. Such solution will generally be a balanced salt solution, e.g. normal saline, phosphate-buffered saline (PBS), Hank's balanced salt solution, etc., conveniently supplemented with fetal calf serum or other naturally occurring factors, in conjunction with an acceptable buffer at low concentration, generally from 5-25 mM. Convenient buffers include HEPES, phosphate buffers, lactate buffers, etc. The cells may be used immediately, or they may be stored, frozen, for long periods of time, being thawed and capable of being reused. In such cases, the cells will usually be frozen in 10% or more DMSO, 50% or more serum, and about 40% buffered medium, or some other such solution as is commonly used in the art to preserve cells at such freezing temperatures, and thawed in a manner as commonly known in the art for thawing frozen cultured cells.

[0311] In some cases, a method of modifying a target nucleic acid comprises homology-directed repair (HDR). In some cases, use of a complex of the present disclosure to carry out HDR provides an efficiency of HDR of at least 1%, at least 2%, at least 3%, at least 4%, at least 5%, at least 10%, at least 15%, at least 20%, at least 25%, or more than 25%.

[0312] In some cases, a method of modifying a target nucleic acid comprises non-homologous end joining (NHEJ). In some cases, use of a complex of the present disclosure to carry out HDR provides an efficiency of NHEJ of at least 1%, at least 2%, at least 3%, at least 4%, at least 5%, at least 10%, at least 15%, at least 20%, at least 25%, or more than 25%.

### Utility

[0313] Methods of the present disclosure for binding and/or modifying a target nucleic acid in a eukaryotic cell are useful in a variety of therapeutic and research applications, including site directed DNA recombination for genome editing, gene inactivation, transcriptional attenuation and transcriptional enhancement.

[0314] Methods of the present disclosure for binding and/or modifying a target nucleic acid in a eukaryotic cell are useful for carrying out non-homologous end joining or homology-directed repair. Thus, for example, a method of the present disclosure for modifying a target nucleic acid in a eukaryotic cell is useful for modifying the genome of the cell, e.g., in the context of treating a disease caused by a mutation in the genome.

### Kits

[0315] The present disclosure provides a kit for carrying out a method of the present disclosure.

[0316] In some cases, a kit of the present disclosure comprises a complex comprising: a) a nanoparticle-nucleic acid conjugate; a Type II or a Type V CRISPR system comprising a site-directed DNA-modifying polypeptide and a guide RNA, and optionally also comprising a donor polynucleotide (e.g., a DNA donor template); and b) a polycation-based endosomal escape polymer. In some cases, a kit includes a recombinant expression vector that provides for in vitro production of a guide RNA.

[0317] In some cases, a kit of the present disclosure comprises a complex comprising: a) a nanoparticle-nucleic acid conjugate; a Cas9 polypeptide; and a guide RNA; and b) a polycation-based endosomal escape polymer. In some cases, a kit of the present disclosure comprises a complex comprising: a) a nanoparticle-nucleic acid conjugate; a Cpf1 polypeptide; and a guide RNA; and b) a polycation-based endosomal escape polymer. In some cases, a kit includes a recombinant expression vector that provides for in vitro production of a guide RNA.

[0318] In some cases, a kit of the present disclosure comprises a complex comprising: a) a nanoparticle-nucleic acid conjugate; a Cas9 polypeptide; a guide RNA; and a donor DNA; and b) a polycation-based endosomal escape polymer. In some cases, a kit of the present disclosure comprises a complex comprising: a) a nanoparticle-nucleic acid conjugate; a Cpf1 polypeptide; a guide RNA; and a donor DNA; and b) a polycation-based endosomal escape polymer. In some cases, a kit includes a recombinant expression vector that provides for in vitro production of a guide RNA.

[0319] In some cases, a kit of the present disclosure includes a colloidal metal nanoparticle conjugated to a nucleic acid. In some cases, a kit of the present disclosure includes: a) a colloidal metal nanoparticle conjugated to a nucleic acid; and b) a Cas9 polypeptide. In some cases, a kit of the present disclosure includes: a) a colloidal metal nanoparticle conjugated to a nucleic acid; b) a Ca9 polypeptide; and c) a guide RNA. In some cases, a kit includes a recombinant expression vector that provides for in vitro production of a guide RNA.

[0320] A kit of the present disclosure can include one or more additional components, e.g., a buffer, a nuclease inhibitor, a protease inhibitor, and the like. A kit of the present disclosure can include a positive control and/or a negative control.

[0321] In addition to above-mentioned components, a subject kit can further include instructions for using the components of the kit to practice the subject methods. The instructions for practicing the subject methods are generally recorded on a suitable recording medium. For example, the instructions may be printed on a substrate, such as paper or plastic, etc. As such, the instructions may be present in the kits as a package insert, in the labeling of the container of the kit or components thereof (i.e., associated with the packaging or subpackaging) etc. In other embodiments, the instructions are present as an electronic storage data file present on a suitable computer readable storage medium, e.g. CD-ROM, diskette, flash drive, etc. In yet other embodiments, the actual instructions are not present in the kit, but means for obtaining the instructions from a remote source, e.g. via the internet, are provided. An example of this embodiment is a kit that includes a web address where the instructions can be viewed and/or from which the instructions can be downloaded. As with the instructions, this means for obtaining the instructions is recorded on a suitable substrate.

### Examples

[0322] The following examples are put forth so as to provide those of ordinary skill in the art with a complete disclosure and description of how to make and use the present invention, and are not intended to limit the scope of what the inventors regard as their invention nor are they intended to represent that the experiments below are all or the only experiments performed. Efforts have been made to ensure accuracy with respect to numbers used (e.g. amounts, temperature, etc.) but some experimental errors and deviations should be accounted for. Unless indicated otherwise, parts are parts by weight, molecular weight is weight average molecular weight, temperature is in degrees Celsius, and pressure is at or near atmospheric. Standard abbreviations may be used, e.g., bp, base pair(s); kb, kilobase(s); pl, picoliter(s); s or sec, second(s); min, minute(s); h or hr, hour(s); aa, amino acid(s); kb, kilobase(s); bp, base pair(s); nt, nucleotide(s); i.m., intramuscular(ly); i.p., intraperitoneal(ly); s.c., subcutaneous(ly); and the like.

[0323] Described below is a delivery vehicle, termed GX or CRISPR-Gold, which can efficiently deliver Cas9 protein, guide RNA and donor oligonucleotides into cells in culture and in vivo, and catalyze site specific DNA hydrolysis and recombination. CRISPR-Gold includes gold nanoparticles that are complexed with a ribonucleoprotein (RNP) comprising Cas9 and a guide RNA(s) and optionally also a donor DNA template, and may also optionally include an endosomal disruptive agent. CRISPR-Gold can be internalized by cells via endocytosis. After endocytosis, the endosomal disruptive agent (if present) releases the CRISPR-Gold into the cytoplasm. Glutathione in the cytoplasm can catalyze release of Cas9 RNP (and, if present, donor DNA) from the CRISPR-Gold through thiol exchange with the gold.

### Materials and Methods

[0324] The following materials and methods were used in the Examples, below.

[0325] Materials. Oligonucleotides were purchased from Integrated DNA Technologies (IDT, Coralville, Iowa). Gold nanoparticles (15 nm) were purchased from BBI solutions. Sodium citrate and 4-(2-hydroxyethyl) piperazine-1-ethanesulfonate (HEPES) were purchased from Mandel Scientific (Guelph, ON). Sodium silicate and cardiotoxin were purchased from Sigma Aldrich (St. Louis, Mo.). Phusion High-fidelity DNA Polymerase was purchased from NEB (Ipswich, Mass.). The Megascript T7 kit, the Megaclear kit, PageBlue solution, propidium iodide, and the PureLink genomic DNA kit were purchased from Thermo Fischer (Waltham, Mass.). Mini-PROTEAN TGX Gels (4-20%) were purchased from Bio-Rad (Hercules, Calif.). MTeSR-1 media gentle cell dissociation reagent was purchased from StemCell Technologies (Vancouver, Canada). Matrigel was purchased from BD Biosciences (San Jose, Calif.). DMEM media, non-essential amino acids, penicillin-streptomycin, DPBS and 0.05% trypsin were purchased from Life Technologies (Carlsbad, Calif.). EMD Millipore Amicon Ultra-4 100 kDa was purchased from Millipore (Germany).

### Expression and Purification of Cas9

[0326] The full-length catalytically active Streptococcus pyogenes Cas9 was cloned into a custom pET-based expression vector encoding an N-terminal 6×His-tag followed by maltose-binding protein (MBP) and a TEV protease cleavage site, as well as two SV40 nuclear localization signal (NLS) peptides at its C-terminus. Recombinant Cas9 protein was expressed in Escherichia coli strain BL21 (DE3) (Novagen) and further purified to homogeneity as previously described. Myers et al. (2013) Integrative biology: quantitative biosciences from nano to macro 5, 1495-1506. Purified Cas9 protein was stored in 50 mM HEPES pH 7.5, 300 mM NaCl, 10% glycerol, 100 μM TCEP at −80° C. S. pyogenes Cas9 D10A nickase was expressed and purified following the same procedure. Cas9 protein concentration was determined by a NanoDrop spectrophotometer from the absorbance at 280 nm.

In Vitro T7 Transcription of sgRNA

[0327] Oligonucleotide primers for sgRNA production were purchased from IDT, with the forward primer containing a T7 promoter sequence. The DNA template for in vitro sgRNA transcription was prepared by overlapping PCR. Briefly, the T7 forward template (20 nM), T7Rev-Long template (20 nM), T7 forward primer (1 μM), and T7 reverse primer (1 μM), were mixed with Phusion Polymerase (NEB) and PCR amplification was performed according to the manufacturer's protocol. RNA in vitro transcription was performed with the MEGAscript T7 kit (Thermo Fisher) and purification of the resulting RNA was conducted using the MEGAclear kit, following the manufacturer's protocol. The transcribed sgRNA was eluted into 50 mM HEPES pH 7.5, 300 mM NaCl, 10% (vol/vol) glycerol, and 100 μM TCEP. The concentration of sgRNA was determined with a Nanodrop 2000 and the final sgRNA products were stored at −80° C. for subsequent experiments.

### Synthesis of PAsp(DET)

[0328] Poly {N—[N-(2-aminoethyl)-2-aminoethyl]aspartamide} (PAsp(DET)) was synthesized as previously reported. Kim et al. (2010) J. Control. Release 145:141; and Miyata et al. (2008) J. Am. Chem. Soc. 130:16287. Briefly, poly(β-benzyl L-aspartate) (PBLA) was synthesized by the ring-opening polymerization of the β-benzyl-L-aspartate N-carboxy-anhydride (BLA-NCA) with initiation by n-butylamine. The polymerization proceeded for 48 hours at 37° C. under an argon atmosphere. The degree of polymerization of the benzyl-L-aspartate (BLA) unit was calculated to be 55 from the ¹H NMR spectrum (DMSO-d₆, 80° C.). The resulting PBLA was reacted with diethylenetriamine (DET) to obtain PAsp(DET). After one hour of reaction, the reaction mixture was added dropwise into cold HCl. The polymer product was purified by dialysis against 0.01 M HCl and then against deionized water overnight at 4° C. The dialyzed solution was lyophilized to obtain the final product.

### Synthesis of CRISPR-Gold

[0329] A representative synthesis of CRISPR-Gold is described in this section. Gold nanoparticles (GNP) (15 nm in diameter, 450 nM) were reacted with a 5′ thiol modified single stranded oligonucleotide (DNA-SH), 25 bases in length (200 μM), which had a region complementary to the donor DNA sequence, the reaction was performed in an Eppendorf tube in 20 mM HEPES buffer, in a 100 μL volume. The NaCl concentration of the reaction was increased a 100 mM per hour up to 400 mM (final volume 150 μL) by adding 1M NaCl solution, and the reaction was allowed to proceed overnight. Unconjugated DNA-SH was removed by centrifugation at 17,000 g for 15 min, and washed two times with 20 mM HEPES buffer. The resulting GNP-DNA conjugate was hybridized with the donor oligonucleotide, generating GNP-Donor. The donor DNA (100 μM concentration, 10 μL) was added to the GNP-DNA solution in 20 mM HEPES with 50 mM NaCl (100 μL), and incubated at 65° C. for 10 min, and gradually brought to room temperature (−2° C./min). The GNP-Donor solution was stored at 4° C. until further use. CRISPR-Gold was synthesized by a layer-by-layer method, right before the in vitro and in vivo experiments. Cas9 (8 μg in 10 μL) and gRNA (2 μg in 10 μL) were mixed in 80 μL of Cas9 buffer (50 mM Hepes (pH 7.5), 300 mM NaCl, 10% (vol/vol) glycerol, and 100 μM TCEP) for 5 min at RT, and this solution was then added to the GNP-Donor solution (0.45 pmole of GNP), generating GNP-Donor-Cas9 RNP. Freshly diluted sodium silicate (60 mM, 2 μL) was added to the GNP-Donor-Cas9 RNP solution and PAsp(DET) was added to generate a final concentration of 100 μg/mL and incubated for 15 min at RT to form the last layer of CRISPR-Gold.

[0330] An example is shown in FIG. 13. Gold nanoparticles 15 nm in diameter were conjugated with a 5′ thiol modified single stranded DNA (DNA-SH), and hybridized with single stranded donor DNA. A CXCR4 donor DNA sequence is presented as an example. The DNA-SH sequence is complementary to 18 nucleotides in the 3′ end of the donor DNA. This CRISPR-Gold intermediate is sequentially complexed with Cas9 ribonucleoprotein (RNP), sodium silicate, and PAsp(DET) to form CRISPR-Gold.

### Absorbance Spectra and Zeta Potential Analysis of CRISPR-Gold

[0331] The synthetic intermediates in the synthesis of CRISPR-Gold, GNPs, GNP-DNA, GNP-DNA-donor DNA, GNP-Cas9 RNP and GNP-Cas9 RNP-Silicate were characterized by UV-vis spectroscopy. The absorbance spectra of each sample was measured with a UV-vis spectrophotometer (NanoDrop 2000, Thermo scientific). Zeta potential measurements were also made on each intermediate at 25° C. Zeta potential measurements were made with a Zetasizer Nano ZS instrument (Malvern Instruments Ltd., Worcestershire, UK), and electrophoretic mobility was measured in a folded capillary cell (DTS 1060, Malvern Instruments), the zeta potential was calculated using the Smoluchowski equation.

[0332] Table 2 provides zeta potential analysis of CRISPR-Gold and its synthetic intermediates. Zeta potential measurements were performed on CRISPR-Gold and all of the synthetic intermediates generated during the construction of CRISPR-Gold. Zeta potential changes demonstrate the sequential synthesis of CRISPR-Gold. For example, GNP-Donor-Cas9 RNP-Silicate had a zeta potential of −18.9 mV and its surface charge density changes to +18.0 mV after the addition of the cationic polymer PAsp(DET).

TABLE 2

| Samples | Zeta Potential (mV) ± S.D. |
|---|---|
| GNP | −28.0 ± 14.2 |
| GNP-DNA | −24.1 ± 16.4 |
| GNP-Donor | −31.2 ± 15.8 |
| GNP-Donor-Cas9 protein | 0.8 ± 8.0 |
| GNP-Donor-Cas9 RNP | −13.2 ± 6.4 |
| GNP-Donor-Cas9 RNP-Silicate | −18.9 ± 5.2 |
| GNP-Donor-Cas9 RNP-Silicate- | 18.0 ± 3.5 |
| PAsp(DET) (CRISPR-Gold) | |

### Gel Electrophoresis Analysis of CRISPR-Gold to Determine Cas9 Protein Content

[0333] The ability of CRISPR-Gold to complex Cas9 was determined via gel electrophoresis. 0.45 pmole of GNP-Donor was incubated with Cas9 (8 μg) and gRNA (2 μg) for 5 min at RT. The particles were centrifuged at 17,000 g for 10 min and the supernatant was removed. The pellet (GNP-Donor-Cas9 RNP) was washed with PBS and centrifuged at 17,000 g for 10 min, the supernatant and the pellets were collected and run on a gel, and analyzed for Cas9 content via densitometry, which demonstrated that GNP-Donor DNA binds Cas9 with high affinity. Similar analysis was performed on CRISPR-Gold. CRISPR-Gold was purified via centrifugation at 3,000 g for 5 min, and the particles and wash solution were analyzed via gel electrophoresis. Gel electrophoresis was performed using a 4-20% Mini-PROTEAN TGX Gel (Bio-rad) in Tris/SDS buffer, with loading dye containing 5% beta-mercaptoethanol. PageBlue solution (Thermo Fischer) staining was conducted and imaged with ChemiDoc MP using ImageLab software (Bio-rad). The percent of Cas9 RNP bound to the GNPs was determined by comparing the recovered Cas9 with the original amount mixed with the particles. The protein content in the particles was quantified via densitometry analysis on the respective gel bands.

Enzymatic Activity of Cas9 Released from CRISPR-Gold

[0334] The enzymatic activity of Cas9 released from CRISPR-Gold was analyzed via gel electrophoresis. Purified samples of GNP-Cas9 RNP and CRISPR-Gold from S7 were prepared. They were incubated in 40 μL PBS containing 5 mM beta-mercaptoethanol at 37° C. for 1 hour, to release Cas9 from the GNPs. The particles were centrifuged at 17,000 g for 10 min, and a 10 μL volume from the supernatants were collected and incubated with a PCR amplicon (200 ng) that contained a Cas9 cleavage site. After incubation at 37° C. for 2 hr, the samples were analyzed by gel electrophoresis using a 4-20% Mini-PROTEAN TGX Gel (Bio-rad), stained with SYBR green (Thermo Fischer) and imaged with ChemiDoc MP using ImageLab software (Bio-rad).

### BFP Expressing HEK Cell Culture

[0335] BFP-HEK cells were generated by infection of HEK293T cells with a BFP-containing lentivirus, followed by FACS-based enrichment, and clonal selection for cells expressing BFP with no silencing after 2-4 weeks. The lentivirus was generated by transfection of HEK293FT cells with a custom lentiviral vector containing a BFP gene driven by the pEF1 promoter, cloned into a Lenti X1 DEST Blast backbone by Gateway cloning (Life Technologies, Inc.). Reporter cell lines were generated by infection of HEK293T cells with lentivirus, at low MOI (as estimated by FACS 3 days post-infection). BFP-positive cells were enriched by FACS, grown out, and sorted into clones by FACS. A clone with high constitutive BFP fluorescence (>99% BFP-positive) after expansion was selected as a reporter for BFP-GFP conversion by CRISPR-Gold-mediated HDR. To edit BFP-HEK to GFP, cells were plated at a density of 5×10⁴ cells per well in a 24 well plate, a day before CRISPR-Gold experiments, and cultured in DMEM with 10% fetal bovine serum (FBS), 1×MEM non-essential amino acids, and 100 μg/mL Pen Strep.

### Stem Cell Culture

[0336] Human H9 embryonic stem (hES) cells and human induced pluripotent stem (hiPS) cells were maintained in Matrigel-coated 6-well tissue culture plates. Cell culture plates were coated with Matrigel diluted to 12.5 μL/mL in DMEM and incubated for an hour at 37° C.¹. MTeSR-1 medium (StemCell Technologies) was added to the cells every day and the cells were passaged every 4-6 days. Gentle cell dissociation reagent (StemCell Technologies) was used for cell detachment, according to the manufacturer's protocol. Stem cells were passaged into 24 well plates, at a density of 2×10⁴ cells per well, 3 days prior to Cas9 transfection.

### Mouse Primary Bone Marrow Derived Dendritic Cell Culture

[0337] Bone marrow cells were obtained from the tibias and femurs of mice. Bone marrow cells were plated in complete medium containing granulocyte-macrophage colony-stimulating factor (GM-CSF) (10 ng/mL; Peprotech) for 6 days to allow for differentiation into DCs. Cas9 transfection was conducted on Day 6.

### Cell Transfection

[0338] For all of the gene editing experiments with CRISPR-Gold, electroporation, or lipofectamine, transfections were conducted on cells when they reached a density of 10⁵ cells per well (in 24 well plates). The sample sizes ranged between n=3 to n=6. This sample size was chosen based on previous papers on Cas9 protein delivery, which demonstrated that n=3 to n=6 was sufficient to generate statistically significant data.

### CRISPR-Gold Treatment

[0339] CRISPR-Gold particles were formed as described above. For all of the in vitro cell experiments, 10⁵ cells in 0.5 mL were treated with 0.45 pmole GNP-Donor (determined by absorbance), Cas9 (8 μg), gRNA (2 μg), 2 μL sodium silicate (60 mM), and 10 μg PAsp(DET). Cas9 and gRNA solution were mixed in Cas9 buffer (50 mM Hepes (pH 7.5), 300 mM NaCl, 10% (vol/vol) glycerol, and 100 μM TCEP for 5 min at RT and added to the GNP-Donor solution. Freshly diluted sodium silicate (60 mM, 2 μL) was added to the GNP solution and incubated for 5 min at RT. The reaction mixture was centrifuged using an EMD Millipore Amicon Ultra-4 100 kDa at 3,000 rpm for 5 min to remove unbound sodium silicate. The recovered gold nanoparticles were resuspended in 20 mM HEPES buffer (100 μL) and PAsp(DET) polymer was added to a final concentration of 100 μg/mL and incubated for 15 min at RT to form the last layer of CRISPR-Gold. In some cases, the concentration of donor DNA hybridized to CRISPR-Gold was varied between 0.5 μg to 6 μg per well treatment. CRISPR-Gold was added to the cells in fresh serum containing medium, and incubated for 16 hr and the medium was changed. The cells were incubated for a total of 3 days before genomic DNA extraction and analysis.

### Nucleofection

[0340] Cells were detached by 0.05 trypsin or gentle dissociation reagent and spun down at 600 g for 3 min, and washed with PBS. Nucleofection was conducted using an Amaxa 96-well Shuttle system following the manufacturer's protocol, using 10 μL of Cas9 RNP and DNA donor (Cas9: 100 pmole, gRNA: 120 pmole, DNA donor: 100 pmole). After the nucleofection, 500 μL of growth media was added and the cells were incubated at 37° C. in tissue culture plates. The cell culture media were changed 16 hr after the nucleofection, and the cells were incubated for a total of 3 days before genomic DNA extraction and analysis.

### Lipofection

[0341] Lipofectamine transfection with Cas9 was performed following the protocol described in Zuris et al. infra, using 4.4 μg of Cas9, 1.2 μg of gRNA, and 1.2 μL of Lipofectamine 2000 in 100 μL total volume. Zuris et al. (2015) Nat. Biotechnol. 33:73. Additionally, donor DNA (250 ng) was mixed with lipofectamine (500 nL) and added to the transfection media, which contained the Cas9 RNP lipofectamine solution. The lipofection was conducted in OptiMEM media without serum, and an equal volume of 2× growth media was added to the cells after 1 hr of lipofection to minimize cytotoxicity. The medium was changed 16 hr after the lipofection and the cells were incubated for a total of 3 days before genomic DNA extraction and analysis.

### Cellular Uptake of CRISPR-Gold

[0342] The uptake of CRISPR-Gold in primary immune cells and bone marrow derived dendritic cells, obtained from the bone marrow of C57BL/6J mice, was determined. Bone marrow derived dendritic cells were cultured on Matrigel coated plates for imaging. CRISPR-Gold (0.45 pmole gold nanoparticle) was incubated with 10⁵ cells in culture media (500 μL) for 16 hr, and the media was changed. After washing 3 times, the cells were observed with a Zeiss inverted microscope and images were taken using Zen 2015 software. Additionally, the treated cells were detached and centrifuged at 600 g for 2 min in Eppendorf tubes, and imaged with a digital camera to determine changes in cell color.

### Flow Cytometry Analysis & Fluorescence Microscopy

[0343] Flow cytometry was used to quantify the expression levels of BFP and GFP in BFP-HEK cells treated with CRISPR-Gold. The flow cytometry experiment was performed on 2 independent times. The BFP-HEK cells were analyzed 7 days after Cas9 treatment. The cells were washed with PBS and detached by 0.05% trypsin. BFP and GFP expression was quantified using BD LSR Fortessa X-20 and Guava easyCyte™

### Sanger Sequencing of the BFP/GFP Gene

[0344] The GFP+ population was sorted from BFP-HEK cells that had been treated with CRISPR-Gold (7 days after treatment). Cells were detached by 0.05% trypsin treatment and the GFP+ edited cells were sorted using a BD influx cell sorter (BD Biosciences) in the Berkeley flow cytometry facility. Genomic DNA was extracted from the GFP+sorted cells and PCR amplification of the BFP/GFP gene was conducted. Sanger sequencing was conducted by Quintara Inc (CA, USA) and the sequence was analyzed with apE software.

PCR Amplification of Genomic DNA from Transfected Cells

[0345] Genomic DNA of 2×10⁴ to 2×10⁵ cells was extracted 3 days after transfection using the Purelink genomic DNA kit (Thermo Fisher). The concentration of genomic DNA was measured with a Nanodrop spectrophotometer. The target genomic DNA sequences (BFP, CXCR, and dystrophin) were amplified using primer sets and Phusion polymerase with high efficiency (HE) or GC buffer according to the manufacturer's protocol. All primer sets were designed to anneal outside of the homology arms of the donor DNA in order to avoid amplifying the donor DNA. The PCR products were analyzed on a 1.5% (wt/vol) agarose gel casted with SYBR Safe (Thermo Fischer).

Analysis of Genome Editing Efficiency with Restriction Enzyme Digestion and Surveyor Assay

[0346] HDR was determined by the restriction enzyme digestion method and indeI mutations were determined by the surveyor assay. The HDR efficiency in cells was determined with restriction enzyme digestion of PCR amplified target genes. Donor DNAs were designed to insert restriction enzyme sites, cleavable by either HindIII or DraI, into the target gene locus. The PCR amplicon of the CXCR4 locus and the PCR amplicon of the DMD locus were incubated with 10 units of HindIII and DraI, respectively. After 2 hr to 16 hr of incubation at 37° C., the products were analyzed by gel electrophoresis using a 4-20% Mini-PROTEAN TGX Gel (Bio-rad) and stained with SYBR green (Thermo fischer). Individual band intensity was quantified using ImageJ and the HDR efficiency was calculated using the following equation: (b+c)/(a+b+c)×100 (a=uncleaved PCR amplicon, b and c=the cleavage products). The surveyor assay was conducted to estimate the total DNA editing by cutting mismatched heteroduplex DNA from mutant DNA and wild-type DNA hybrid. Hybridization and SURVEYOR incubation were performed as described in Schumann et al. ((2015) Proc. Natl. Acad. Sci. USA 112:10437.

### Cell Viability Assays

[0347] The relative cell viabilities of cells transfected with CRISPR-Gold, nucleofection, and lipofection were determined with a cell counting kit (Dojindo) using regular culture media supplemented with 10% (v/v) CCK solution. The CCK assay was conducted 2 days after the transfection. Relative cell viability was defined as percent viability compared to untreated controls. An additional cell viability test was conducted on myoblasts using the propidium iodide assay. Staining of myoblasts treated with the various transfection methods was conducted 2 days after the transfection following the manufacturer's manual. Flow cytometry analysis was conducted with Guava easyCyte™.

Sanger Sequencing of hES Edited with CRISPR-Gold

[0348] The CXCR4 PCR amplicon of CRISPR-Gold treated hES cells were cloned into plasmids using a Zero Blunt TOPO PCR cloning kit (Life Technologies), following the manufacturer's instruction. Briefly, TOP10 E. coli were transformed with plasmids containing the PCR amplicons and cultured on LB plates containing kanamycin. Sanger sequencing of the CXCR4 gene cloned into the E. coli colonies was conducted by Quintara Bioscience (CA, USA).

In Vivo Delivery of CRISPR-Gold in Mdx Mice Treated with Cardiotoxin

[0349] Male C57BL/10ScSn (wild-type) mice and C57BL/10ScSn-Dmdmdx/J (mdx) mice that contain a nonsense mutation in exon 23 of the dystrophin gene were purchased from Jackson Laboratory. All animal studies were performed following authorized protocols and animals were treated in accordance with the policies of the animal ethics committee of the University of California at Berkeley and ACUC. Three groups of mdx mice were used for this experiment. The experimental groups were: Control (no GNP)=mice injected with Cas9 RNP and donor DNA without gold nanoparticle (n=3), Control (no gRNA)=mice injected with CRISPR-Gold without gRNA (n=1), CRISPR-Gold=mice injected with CRISPR-Gold, which received CRISPR-Gold with all materials (n=3).

[0350] CRISPR-Gold treatments were performed in 2 month old mdx mice in the tibialis anterior (TA) muscle (10 μL per muscle) and gastrocnemius muscles (10 μL per muscle), using a Hamilton syringe. The injection mix contained 10 μL of cardiotoxin (0.1 mg/ml) mixed with 0.1 mg/mllidocaine hydrochloride. Two weeks after the injection, the muscles were harvested and analyzed.

[0351] CRISPR-Gold particles were formed as described above. For all mdx in vivo experiments, 6.75 pmole GNP, 120 μg Cas9, 30 μg gRNA, 30 μL sodium silicate (60 mM), and 150 μg PAsp(DET) were injected per mouse. CRISPR-Gold particles were concentrated to a 60 μL total volume, which was distributed between the two hind legs, each hind leg received a total of 30 μL in 6 injection sites. Controls were injected with the same protocol. The experiments were conducted non-blinded and in a non-randomized way.

### Sequence of Genomic DNA Targeted in the Mdx Mouse and the Sequence of the Donor DNA

[0352] As shown in FIG. 15, donor DNA was designed to replace the stop codon in the mutated dystrophin gene. Non-sense mutation and donor DNA sequence designed to repair the mutation are marked in the pink box, nucleotides marked in green (A, G, G) are silent mutations that prevent Cas9 activity on the edited sequence. Repair with the donor DNA sequence generates a DraI restriction enzyme site (TTTAAA), which is used for HDR analysis.

In Vivo Delivery of CRISPR-Gold in Mdx Mice without Cardiotoxin Treatment

[0353] Male C57BL/10ScSn (wild-type) mice and C57BL/10ScSn-Dmdmdx/J (mdx) mice that contain a nonsense mutation in exon 23 of the dystrophin gene were purchased from Jackson Laboratory. All animal studies were performed following authorized protocols and animals were treated in accordance with the policies of the animal ethics committee of the University of California at Berkeley. Two groups of mdx mice were used for this experiment. The experimental groups were: Negative Control=mdx mice without injection (n=6), Control (scrambled CRISPR-Gold)=mice injected with CRISPR-Gold with scrambled gRNAc (n=9), CRISPR-Gold=mice injected with CRISPR-Gold, which received CRISPR-Gold with all materials (n=9). The injections were conducted in 3 week old mdx mice in the tibialis anterior (TA) muscle (10 μL per muscle), gastrocnemius muscle (10 μL per muscle), and forelimb muscle (10 μL per muscle) using a Hamilton syringe. Two weeks after the injection, the mice received a second round of injections with exactly the same composition. Two weeks and 3 months after the second injection, mice were sacrificed and the muscles were analyzed by deep sequencing and for dystrophin protein.

[0354] A four limb hanging test was conducted on CRISPR-Gold treated mdx mice, at the age of 5 weeks, which is two weeks after the initial injection. Mice were placed on a hand made square apparatus with a grid structure. The apparatus was inverted and positioned 25 cm up from the cage to discourage intentional dropping. Soft bedding was prepared to prevent the mice from harming themselves if they fell. The maximum hanging time out of three trials was recorded for a duration of 600 sec. A fixed hanging limit was set at 600 sec. The maximum hanging time was divided by weight. The wild type mice were also tested at the age of 5 weeks. An unpaired student t test was conducted using Prism 7 software. The experiments were conducted in a blinded manner

### Deep Sequencing Analysis of CRISPR-Gold Treated Muscle Tissue

[0355] The genomic region of the Cas9 target sequence was amplified by PCR using Phusion high-fidelity polymerase according to the manufacturer's protocol. Target genes were amplified first with primer sets used for HDR detection and amplified again with deep sequencing primers to eliminate the potential of donor sequence amplification. The amplicons were purified using the ChargeSwitch PCR clean-up kit (Thermo Fischer). The Nextflex rapid illumine DNA-seq library prep kit was used to attach illumine adapters and PCR amplify the product for five cycles. PCR clean-up was performed one additional time. The Berkeley Sequencing facility performed DNA quantification using a Qubit 2.0 Fluorometer (Life Technologies, Carlsbad, Calif.). BioAnalyzer for size analysis and qPCR quantification followed. The library was sequenced with the Illumina HiSeq2500 in the Vincent Coates Genomic Sequencing Laboratory at UC Berkeley. The analysis was conducted using the CRISPR Genome Analyzer. Kim et al. (2010) J. Control. Release 145, 141-148.

### Immunohistochemistry of Dystrophin Protein

[0356] Collected gastrocnemius and tibialis anterior muscles were frozen sectioned and fixed with 4% paraformaldehyde for 15 min at RT. After blocking for 1 hr, a primary antibody against dystrophin (Santa Cruz Biotechnology-47760 or 358922) was incubated with the samples overnight. After extensive washing with PBS, a secondary antibody (Santa Cruz Biotechnology-2005 or 362282) was incubated with the samples for 1 hr at RT. The samples were stained with DAPI staining and analyzed via microscopy Laminin staining was conducted with same method using a primary antibody against laminin (Santa Cruz Biotechnology-74418) and secondary antibody (Santa Cruz Biotechnology-362257).

### High Throughput Imaging of a Whole Muscle Section

[0357] Glass slides with whole muscle sections stained for dystrophin protein were imaged with Molecular Devices ImageXpress Micro. On average, about 288 images were taken per slide with a 10× objective lens. The images were analyzed using MetaXpress software to merge the images and create a montage of the whole muscle sections.

PCR Amplification of Genomic DNA from CRISPR-Gold Edited Muscle Tissue

[0358] Muscle genomic DNA from either control mice (Cas9 RNP+donor DNA without GNP) or CRISPR-Gold treated mice was amplified with primers designed to only amplify the HDR edited sequence. PCR was conducted using the forward primer (AAAGGAGCAGCAGAATGGCT; SEQ ID NO: 1124), the reverse primer (CCACCAACTGGGAGGAAAG; SEQ ID NO: 1105), and Phusion polymerase with high GC buffer according to the manufacturer's protocol. The PCR products were analyzed on a 1.5% (wt/vol) agarose gel casted with SYBR Safe (Thermo fischer).

### Off-Target Deep Sequencing Analysis

[0359] Deep sequencing was performed on CRISPR-Gold treated mdx mice (with CTX and without CTX) to investigate the frequency of off-target genomic damage. Potential off-target loci were determined using CRISPR off-target prediction programs. PCR was conducted using primers listed in Table 3.

TABLE 3
Off-target primers

| | |
|---|---|
| OT-01_F | TATGCCACTTCTTCAAAGAGATGAT |
| | (SEQ ID NO: 1125) |
| OT-01_R | AACAAGCAAACAATTCAAAGGATAG |
| | (SEQ ID NO: 1126) |
| OT-02_F | AAGAAGATATGGCATTGCTGGTA (SEQ ID NO: 1127) |
| OT-02_R | TCTGGAAACAAAAAGGCAATG (SEQ ID NO: 1128) |
| OT-04_F | CTATGAGTTTACCACCCTAATGTGC |
| | (SEQ ID NO: 1123) |
| OT-04_R | CTTATGCTTGTTCAGGCAAATACC |
| | (SEQ ID NO: 1130) |
| OT-08_F | TTTCTTGGAGCTGTAGTGTGTACTG |
| | (SEQ ID NO: 1131) |
| OT-08_R | GGAATAGAGTGAGCATTGTTCTGAT |
| | (SEQ ID NO: 1132) |
| OT-15_F | TTAAGCGGAAAGATAAGCTGAAGTA |
| | (SEQ ID NO: 1133) |
| OT-15_R | GGACCAATGTTACTGGAACACATAC |
| | (SEQ ID NO: 1134) |
| OT-21_F | CATGAAGATACAGAAACATCCCAGT |
| | (SEQ ID NO:1135) |
| OT-21_R | GGAGTGGCACCCTCCTTAC (SEQ ID NO: 1136) |

[0360] The amplicons were purified using the ChargeSwitch PCR clean-up kit (Thermo Fischer). The Nextflex rapid illumine DNA-seq library prep kit was used to attach illumine adapters and PCR amplify the product for five cycles. PCR clean-up was then performed a second time. The Berkeley Sequencing facility performed DNA quantification using a Qubit 2.0 Fluorometer (Life Technologies, Carlsbad, Calif.). BioAnalyzer for size analysis and qPCR quantification followed. The library was sequenced with the Illumina HiSeq2500 in the Vincent Coates Genomic Sequencing Laboratory at UC Berkeley using 150PE read. The analysis was conducted using CRISPR Genome Analyzer (54.80.152.219). FIG. 16 presents the off-target mutation frequency of control (scrambled CRISPR-Gold injected mouse) and the CRISPR-Gold injected mouse samples (without CTX). Table 4 presents the off-target frequency of the control (naked Cas9 RNP and CTX injected mouse) and CRISPR-Gold injected mice (with CTX).

TABLE 4

| | | Average | CRISPR- | Average |
|---|---|---|---|---|
| | Control | Reads | Gold | Reads |
| OT-01 | 0.573 | 1449020 | 0.172 ± 0.008 | 2122047 |
| OT-02 | 0.009 | 1455510 | 0.009 ± 0.001 | 1417348 |
| OT-04 | 0.008 | 1881566 | 0.005 ± 0.001 | 1606093 |
| OT-08 | 0.042 | 3496042 | 0.023 ± 0.008 | 326289 |
| OT-15 | 0.01 | 1347557 | 0.083 ± 0.066 | 1512108 |
| OT-21 | 0.009 | 3579136 | 0.011 ± 0.003 | 2569223 |

[0361] Table 4. CRISPR-Gold causes insignificant levels off-target mutations, which are in the range of deep sequencing error. The major predicted and reported off-target sites for the mdx gRNA were analyzed with deep sequencing to check for off-target mutations. The off-target mutations from the negative control composed of CRISPR-Gold with a scrambled gRNA and CRISPR-Gold are compared in the table. Every sample had more than 30,000 deep sequencing reads. CRISPR-Gold treated mice had very low levels of off-target site indeI mutations, which were generally below the accuracy of deep sequencing. CRISPR-Gold samples (mean±S.E, n=2).

[0362] Table 5 provides primers for HDR analysis

TABLE 5
Primers for HDR analysis
mdx

| | |
|---|---|
| Forward | GAGAAACTTCTGTGATGTGAGGACATATAAAG; |
| | (SEQ ID NO: 1100) |
| Reverse | CAATATCTTTGAAGGACTCTGGGTAAAATATC; |
| | (SEQ ID NO: 1101) |

CXCR

| | |
|---|---|
| Forward | TTAATTCTCTTGTGCCCTTAGCCCACTACTTCAG; |
| | (SEQ ID NO: 1102) |
| Reverse | GGACAGGATGACAATACCAGGCAGGATAAGGCC; |
| | (SEQ ID NO: 1103) |

[0363] Table 6 provides sequencing primers

TABLE 6
Sequencing Primers
mdx

| | |
|---|---|
| Forward | GCGTGTTAGTGTAAATGAACTTCTA; |
| | (SEQ ID NO: 1104) |
| Reverse | CCACCAACTGGGAGGAAAG; |
| | (SEQ ID NO: 1105) |

CXCR

| | |
|---|---|
| Forward | GAGAAGCATGACGGACAAGTACAGGCTG; |
| | (SEQ ID NO: 1106) |
| Reverse | TTGACTGTGTAGATGACATGGACTGCCT; |
| | (SEQ ID NO: 1107) |

BFP

| | |
|---|---|
| Forward | TGTCCGGCGAGGGCGAGGGCGAT; |
| | (SEQ ID NO: 1108) |
| Reverse | CGTCCTTGAAGAAGATGGTGCGC; |
| | (SEQ ID NO: 1109) |

[0364] Table 7 provides thiol oligonucleotides for conjugation to gold nanoparticles (GNP)

TABLE 7
Thiol oligonucleotides for conjugation to GNP

| | |
|---|---|
| BFP-SH | /5ThioMC6-D/GCGCTCCTGGACGTAGCCTTCGGGCAT; |
| | (SEQ ID NO: 1110) |
| mdx-SH | /5ThioMC6-D/AAATTCTGACAGATATTTCTGGCATATTTC; |
| | (SEQ ID NO: 1111) |
| CXCR4_ | /5ThioMC6-D/AATAGATGACATGGACTGCC; |
| SH | (SEQ ID NO: 1112) |

[0365] Table 8 provides nucleotide sequence of donor DNA

TABLE 8

| | |
|---|---|
| MDX | TGATATGAATGAAACTCATCAAATATGCGTGTTAGTGTAAATGAACTTCTAT |
| | TTAATTTTGAGGCTCTGCAAAGTTCTTTAAAGGAGCAGCAGAATGGCTTCA |
| | ACTATCTGAGTGACACTGTGAAGGAGATGGCCAAGAAAGCACCTTCAGAA |
| | ATATGCCAGAAATATCTGTCAGAATTT (SEQ ID NO: 1113) |
| CXCR | CCTGGTCATGGGTTACCAGAAGAAACTGAGAAGCATGACGGACAAGTACA |
| | GGCTGCACCTGTCAGTGGCCGACCTCCTAAGCTTGGATCCCTTTGTCATC |
| | ACGCTTCCCTTCTGGGCAGTTGATGCCGTGGCAAACTGGTACTTTGGGAA |
| | CTTCCTATGCAAGGCAGTCCATGTCATCTA (SEQ ID NO: 1114) |
| BFP | GATGCCACCTACGGCAAGCTGACCCTGAAGTTCATCTGCACCACCGGCAA |
| | GCTGCCCGTGCCCTGGCCCACCCTCGTGACCACCGTGACGTACGGCGTG |
| | CAGTGCTTCAGTCGCTACCCCGACCACATGAAGCAGCACGACTTCTTCAA |
| | GTCCGCCATGCCCGAAGGCTACGTCCAGGAGCGC (SEQ ID NO: 1115) |

[0366] Table 9 provides nucleotide sequence of sgRNA T7 template forward primer sequences

TABLE 9

| | |
|---|---|
| CXCR | GATCCTAATACGACTCACTATAGAAGCGTGATGACAAAGA |
| | GGGTTTTAGAGCTAGAAATAGCAAGTTAAAATAAGGC |
| | (SEQ ID NO: 1116) |
| mdx | GATCCTAATACGACTCACTATAGGTCTTTGAAAGAGCAATA |
| | AAAGTTTTAGAGCTAGAAATAGCAAGTTAAAATAAGGC |
| | (SEQ ID NO: 1117) |
| GFP_L2 | GATCCTAATACGACTCACTATAGCTGAAGCACTGCACGCC |
| | ATGTTTTAGAGCTAGAAATAGCAAGTTAAAATAAGGC |
| | (SEQ ID NO: 1118) |
| CXCR_F1 | GATCCTAATACGACTCACTATAGTACAGGCTGCACCTGTC |
| (Cas9- | AGGTTTTAGAGCTAGAAATAGCAAGTTAAAATAAGGC |
| nickase) | (SEQ ID NO: 1119) |
| DMD | GATCCTAATACGACTCACTATAGTCTTTGAAAGAGCAACAA |
| | AAGTTTTAGAGCTAGAAATAGCAAGTTAAAATAAGGC |
| | (SEQ ID NO: 1120) |
| Ai9_F | GGATCCTAATACGACTCACTATAgAAAGAATTGATTTGATA |
| | CCGGTTTTAGAGCTAGAAATAGCAAGTTAAAATAAGGC |
| | (SEQ ID NO: 1121) |
| | GGATCCTAATACGACTCACTATAgGTATGCTATACGAAGTT |
| | ATTGTTTTAGAGCTAGAAATAGCAAGTTAAAATAAGGC |
| | (SEQ ID NO: 1122) |

### Example 1: Loading Gold Nanoparticles with Active Cas9/gRNA Ribonucleoproteins (RNPs)

[0367] 30 nm gold nanoparticles were reacted with thiol modified DNA, and then complexed with Cas9 and guide RNA. Then, to ensure that the Cas9-gold nanoparticles have endosomal disruptive capability, a layer by layer approach was used to encapsulate the Cas9 in consecutive layers of silicate and the endosomal disruptive polymer, (poly{N—[N-(2-aminoethyl)-2-aminoethyl]aspartamide} (PAsp(DET)). The degree of complexation was assessed by centrifuging the gold nanoparticles and quantifying the Cas9 that was pulled out of solution; the recovered Cas9 was also assayed for activity via cleavage of a vascular endothelial growth factor (VEGF) template DNA. FIGS. 2A and 2B demonstrate that DNA modified gold nanoparticles (GNPs) complexed with Cas9 with extremely high affinity, and that the complexed Cas9 was active against target DNA.

[0368] FIGS. 2A and 2B. Cas9/gRNA RNP loaded onto GNP and released with activity in reducing conditions. (FIG. 2A) Cas9 loading gel shows efficient Cas9 loading to GNP. (FIG. 2B) In vitro cleavage gels shows that Cas9/gRNA RNP is released with good activity. Model VEGF DNA template is cleaved into two fragments by Cas9/gRNA RNP released from GNP with and without polymer layers.

### Example 2: Cas9 Delivery and Gene Editing Using GX (Cas9-Gold Nanoparticle Complexes)

[0369] Experiments were performed to determine if Cas9 delivered by gold could cause site-specific DNA cleavage in cells, using blue fluorescent protein (BFP)-expressing HEK293 cells.

[0370] FIG. 3A depicts a schematic of protocol for testing in vitro Cas 9 delivery and activity by GNPs.

[0371] FIG. 3B. In vitro CRISPR-Gold treatment shows efficient editing in BFP-HEK cells. Scheme of BFP-HEK cell editing. BFP gene targeting with Cas9/gRNA produces two types of editing: non-homologous end joining (NHEJ) and homology directed repair (HDR). NHEJ in BFP-HEK cells frequently induces BFP knock-out and HDR with donor sequence converts BFP to GFP.

[0372] FIG. 3C. Fluorescence images show GFP expression from Gold-Cas9/donor treated BFP-HEK cells. Three times of CRISPR-Gold treatment induced GFP expression from the treated BFP-HEK cells. Left image is a bright field image. Right image is taken with GFP filter. Scale bar is 20 μm.

[0373] FIG. 3D-3E demonstrate that Cas9-gold nanoparticles can effectively deliver Cas9 into cells and induce gene editing in HEK293 cells. For example, HEK293 cells treated with Cas9-gold resulted in a new population, which were YFP negative and represented 10% of the total population, thus demonstrating that an insertion/deletion (indeI) mutation occurred in these cells. Importantly, Cas9 gold nanoparticles had a Cas9 delivery efficiency that was comparable to conventional protein transfection reagents, such as Lipofectamine®, yet Cas9-gold nanoparticles had no toxicity up to a concentration of 100 micromoles/liter, which was significantly lower than other commonly used transfection reagents, such as Lipofectamine®. These results suggested that Cas9 gold can be given to cells, multiple times, to increase efficiency. Therefore, it was investigated if multiple delivery of Cas9 via GX would be able to increase the Cas9 delivery and mutation frequency.

[0374] The data presented in FIG. 3D show that BFP knock-out population appears 6 days after CRISPR-Gold (without donor) treatment to the BFP-HEK cells. Lipofectamine transfection was conducted as a positive control. Flow cytometry analysis shows that three times of CRISPR-Gold treatment generates very clear BFP knock-out population. FIG. 3D (bottom) demonstrates that treating cells with GX three times dramatically increased mutation efficiency to 50% after 3 treatments.

[0375] FIG. 3E. BFP gene editing to GFP was observed with flow cytometry from the Gold-GNP/donor treated BFP-HEK cells. Compared to negative control showing no GFP+population, Gold-GNP treatment induced GFP expressing population from the BFP-HEK cells.

[0376] FIG. 3F. BFP to GFP genome editing was observed from sequencing result. GFP expressing cells from the CRISPR-Gold treated BFP-HEK cells were FACS sorted and sequence. Compared to the original BFP sequence, GFP expressing cells had 4 nucleotide editing, same as the donor DNA sequence, substituting histidine to tyrosine. Two other sequence editing was silent mutation to prevent Cas9 activity on the edited sequence.

[0377] Experiments were performed to determine if gold nanoparticles could deliver Cas9, guide RNA and donor oligonucleotides into cells and generate homology directed repair (HDR) in target cells. For these experiments a guide was designed that cut the VEGF-R gene and a donor oligonucleotide was designed that introduced a HindIII nuclease site. Initial experiments were performed on HEK 293 cells to determine if the multifunctional gold nanoparticles could stimulate HDR. FIG. 4A demonstrates that gold nanoparticles were very efficient at catalyzing HDR, and approximately 15-16% of the targets were HDR positive.

[0378] FIG. 4A. Endogenous genes are edited with Gold-GNP. CRISPR-Gold edited CXCR gene in HEK cells. A restriction enzyme HindIII cut site was incorporated into the CXCR4 gene and HDR efficiency was quantified by CXCR4 PCR cleavage by HindIII. 16.2% HDR was achieved with Gold-Cas9/donor.

### Example 3: Cas9 Delivery and Gene Editing in Embryonic Stem Cells and Primary Myoblasts Using GX (Cas9-Gold Nanoparticle Complexes)

[0379] Experiments were performed to determine if gold nanoparticles could deliver Cas9, guide RNA and donor DNA into human embryonic stem (hES) cells and induce HDR. FIG. 4B demonstrates that Cas9-gold nanoparticles were exceptionally efficient at inducing HDR in embryonic stem cells. For example, Cas9-gold generated HDR in 4.5% of target cells, which was comparable to electroporation. Importantly, Lipofectamine® had only a 0.1% HDR efficiency in these cells, and gold nanoparticles were thus much better at generating HDR than conventional protein transfection reagents.

[0380] FIG. 4B. Gold-Cas9/donor efficiently edited CXCR gene in human embryonic stem (hES) cells. Nucleofection was conducted as a positive control with twice or more amounts of Cas9, gRNA, and donor DNA than Gold-Cas9. Gold-Cas9/donor DNA delivery edited hES cells and Cas9-Nickase induced 5.01% HDR, which was comparable to the HDR efficiency of nucleofection.

[0381] FIG. 4C. CRISPR-Gold keeps high cell viability compared to nucleofection.

[0382] Nucleofection caused 60% of cell death 2 days after the transfection. However, CRISPR-Gold maintained comparable cell viability to untreated control. mean±S.E, n=6. *, p<0.05, ns=statistically not significant to control.

[0383] FIG. 4D. Primary mouse bone marrow derived dendritic cells were edited with CRISPR-Gold. The dendritic cells are suspension cells freshly isolated from mouse bone marrow. CRISPR-Gold induced 6% of NHEJ and 3% of HDR in target dystrophin sequence.

[0384] Finally it was investigated if gold nanoparticles could deliver Cas9 and donor oligonucleotides to muscle cells, e.g., myoblasts that contain the muscular dystrophy mutation, obtained from the MDX mouse, and catalyze HDR in muscle cells. FIG. 4E-4F demonstrate that GX can efficiently deliver Cas9, guide RNA and donor DNA into myoblasts with minimal toxicity. For example, a gene correction rate of 3.5% was observed with GX, which was higher than electroporation. In addition, under these conditions, GX had minimal toxicity, whereas electroporation had approximately 50% toxicity.

[0385] FIG. 4E-4F. (FIG. 4D) Primary myoblasts from mdx mouse were efficiently edited with Gold-Cas9/donor. Point mutation of the mouse myoblasts was edited to normal sequence with efficiency close to 3.3%, which is significantly higher percentage than the HDR efficiency of nucleofection. mean±S.E, n=3. *, p<0.05. (FIG. 4F) Compared to very low cell viability of nucleofected primary myoblasts, Gold-Cas9 and Lipofectamine® treated cells had comparable cell viability to the cells without any treatment. mean±S.E, n=6. *, p<0.05, ns=statistically not significant to control.

### Example 4: In Vivo Delivery of Cas9 by Gold Nanoparticles

[0386] FIG. 5A. Synthetic scheme of CRISPR-Gold. DNA-thiol conjugated to Gold Nanoparticle (GNP) is hybridized with donor single strand DNA. Cas9/gRNA ribonucleoproteins (RNPs) are loaded and the particle is coated with Silicate and PASp(DET) polymer, which helps cellular uptake and endosomal escape.

[0387] Experiments were performed to determine if Cas9 labeled with Alexa 647 and delivered by gold nanoparticles can be internalized by muscle tissue after an intramuscular injection.

[0388] FIG. 5B is a schematic depiction of the experiment.

[0389] FIGS. 5C and 5D demonstrate that gold nanoparticles can deliver Cas9, guide RNA and donor DNA into muscle cells after an intramuscular injection. For example, Cas9 delivered via gold nanoparticles had approximately 60% retention in the muscle tissue after injection.

[0390] FIG. 5C-5D. In vivo delivery of Gold-Alexa647 Cas9 shows retention of Alexa647 Cas9 in the muscle injection site. (FIG. 5C) IVIS® image of Gold-Alexa647 Cas9 injected mouse 4 hr after injection shows significant Alexa647 signal from the muscle injection site. Ex580/Em620 filter shows that there was no auto-fluorescence. Ex640/em680 filter showed significant fluorescence in the injection site. (FIG. 5D) Injected Gold-Alexa647 Cas9 retained in muscle. Organs were harvested 4 hr after injection and imaged with IVIS®. Strong fluorescence was observed only from the muscle.

### Example 5: Activity of Cas9 Delivered In Vivo by Gold Nanoparticles

[0391] Experiments are performed to determine if GX can deliver functional Cas9, donor DNA and guide RNA and correct the MDx mutation in mice and regenerate functional muscle tissue. Mice are injected with Cas9, donor DNA and gold nanoparticles, using guide RNA that target the MDx mutation. Two weeks later the mice are harvested and analyzed for dystrophin protein production, via histology.

### Example 6: Correction of DMD-Mdx Dystrophin In Vivo

[0392] CRISPR-gold particles correct DMD-mdx dystrophin in vivo. Mutation-correcting nanoparticles along with cardiotoxin were injected into young (2 month old) DMD-mdx TA muscle (2 sites of 5 μl) and gastrocnemius muscles (four sites of 5 μl), or into the same sites in wild-type mice; the mice were allowed to heal for 2 weeks. Particles lacking cas9 were used as a negative control. Muscle was dissected, sectioned, and immunostained. The results are depicted in FIG. 10A-10B. Sectioned muscle was immunostained for Dystrophin (red, FIG. 10A) with Hoechst staining nuclei blue. Nanoparticle aggregates auto-fluoresce on the green and red (but not blue) channels. Dystrophin protein (lacking in DMD/MDX) becomes expressed in most/all muscle fibers (myofibers) at the site of CRISPR-gold particles injection after a single application (red outlines of the myofibers show re-expressed dystrophin protein, which is in the same area of muscle as the auto-fluorescent CRISPR-gold particles). Negative control particles, which had no Cas9 did nor restore the expression of dystrophin. Positive control shows dystrophin expression and localization in the wild type mouse muscle.

[0393] As depicted in FIG. 10B, muscle sections were solubilized and denatured in Laemmli buffer, resolved by sodium dodecyl sulfate-polyacrylamide gel electrophoresis (SDS-PAGE) and Western blotted for dystrophin protein. A serial dilution of wild-type muscle protein was loaded to determine the amount of corrected dystrophin protein. Qualitatively, the amount of corrected dystrophin by Western analysis correlates with the muscle cross-sectional area of dystrophin staining seen by immunofluorescent histology.

### Example 7: Translational Potential of CRISPR-Gold as a Therapeutic for DMD

[0394] CRISPR-Gold injection improves muscle fibrosis in vivo. TA muscles of 2 months old mdx or wild-type mice were cryosectioned to 10 microns and stained with trichrome two weeks after injection with CRISPR-Gold and cardiotoxin. The results are depicted in FIG. 11A. Sections from animals injected with cardiotoxin and a scrambled CRISP-Gold or cardiotoxin alone were used as controls. Fibrotic tissue appears in blue, while muscle fibers appear red. Qualitatively, the reduced level of fibrotic tissue staining in sections from the CRISPR-Gold and cardiotoxin treated animal indicates improved tissue health.

[0395] CRISPR-Gold injection enhances muscle strength and agility. Three week old mdx mice were injected in TA muscle, gastrocnemius muscle and forelimb muscle with 10 microns per muscle of mutation correcting nanoparticles without cardiotoxin. A four limb hanging test was conducted on 5 week old mice (2 weeks after the injection) by placing the mice on a hand-made square apparatus with a grid structure. The apparatus was inverted and placed 25 cm up from the cage to discourage intentional dropping. The maximum hanging time out of three trials was recorded for the duration of 600 sec and divided by the weight of the tested mouse. Negative control mice (mdx mice without injection), control mice (mdx mice injected with CRISPR-Gold with scrambled gRNAc) and wild-type were animals were also tested at the age of 5 weeks. The results depicted in FIG. 11B show a 100% increase in hanging time per weight in the four limb hanging test in comparison to mdx control mice. FIG. 11C shows that HDR in the dystrophin gene of CRISPR-Gold treated mice occurred at a rate of 0.8% compared to the control mice. The lower rate of HDR was expected because of the absence of cardiotoxin.

### Example 8: Gene Editing Using Various GX Components

[0396] Experiments were performed to determine HDR efficiency if components of the Cas9-Gold Nanoparticle complexes were varied.

[0397] FIG. 12. BFP-HEK cells were efficiently edited with CRISPR-Gold loaded onto gold nanoparticles of various sizes. 15 nm, 60 nm and 150 nm gold nanoparticles were reacted with thiol modified DNA, complexed with Cas9 and guide RNA, and encapsulated with PAsp(DET). GFP expressing populations were observed using flow cytometry. As shown in FIG. 12, using various sizes of gold nanoparticles, HDR efficiencies of from about 1.8 to about 8% were achieved.

[0398] Silver nanoparticles can deliver Cas9. DNA conjugation and particle formation using a method similar to CRISPR-Gold formation substituting gold nanoparticles with silver nanoparticles results in BFP-HEK cells efficiently edited at a rate of 4-8% gene editing.

[0399] Experiments were performed to determine if a polymer other than PAsp(DET) could be used to form GX. Replacing the endosomal disruptive polymer PAsp(DET) with polyethylenimine (PEI), Cas9-Gold nanoparticles were formed and induced HDR at a rate of 1%.

[0400] CRISPR-Gold can also deliver Cas9 derivatives. SpCas9-H1, eSpCas9 and Cpf1 with its derivative crRNA were delivered and gene editing was performed using the GX delivery vehicle.

### Example 8: Effect of the Amount of Donor DNA on the HDR Frequency of CRISPR-Gold Treatment

[0401] CRISPR-Gold was made with various amounts of donor DNA, and added to BFP-HEK cells. Each well received 8 μg of Cas9 protein. The HDR frequency was determined by quantifying the percent of GFP+population from CRISPR-Gold treated BFP-HEK cells. The amount of Donor DNA has a correlation with HDR efficiency. The HDR efficiency reaches a maximum at 4 μg of Donor DNA per 8 μg of Cas9. As shown in FIG. 14, the HDR frequency of CRISPR-Gold treatment is dependent on the amount of donor DNA in CRISPR-Gold.

[0402] While the present invention has been described with reference to the specific embodiments thereof, it should be understood by those skilled in the art that various changes may be made and equivalents may be substituted without departing from the true spirit and scope of the invention. In addition, many modifications may be made to adapt a particular situation, material, composition of matter, process, process step or steps, to the objective, spirit and scope of the present invention. All such modifications are intended to be within the scope of the claims appended hereto.

The application's sequence listing, which the Patent Office published only in electronic form, follows.

SEQUENCE LISTING (1139 sequences)

SEQ ID NO: 1 - protein, 15 aa, Artificial sequence
  synthetic peptide sequence
IGLDIGTNSVGWAVI

SEQ ID NO: 2 - protein, 8 aa, Artificial sequence
  synthetic peptide sequence
IVIEMARE

SEQ ID NO: 3 - protein, 27 aa, Artificial sequence
  synthetic peptide sequence
DVDHIVPQSFLKDDSIDNKVLTRSDKN

SEQ ID NO: 4 - protein, 8 aa, Artificial sequence
  synthetic peptide sequence
HHAHDAYL

SEQ ID NO: 5 - protein, 1368 aa, Streptococcus pyogenes
MDKKYSIGLDIGTNSVGWAVITDDYKVPSKKFKVLGNTDRHSIKKNLIGALLFDSGETAEATRLKRTARRRYTRRKNRICYLQEIFSNEMAKVDDSFFHRLEESFLVEEDKKHERHPIFGNIVDEVAYHEKYPTIYHLRKKLVDSTDKADLRLIYLALAHMIKFRGHFLIEGDLNPDNSDVDKLFIQLVQTYNQLFEENPINASGVDAKAILSARLSKSRRLENLIAQLPGEKKNSLFGNLIALSLGLTPNFKSNFDLAEDAKLQLSKDTYDDDLDNLLAQIGDQYADLFLAAKNLSDAILLSDILRVNTEITKAPLSASMIKRYDEHHQDLTLLKALVRQQLPEKYKEIFFDQSKNGYAGYIDGGASQEEFYKFIKPILEKMDGTEELLVKLNREDLLRKQRTFDNGSIPHQIHLGELHAILRRQEDFYPFLKDNREKIEKILTFRIPYYVGPLARGNSRFAWMTRKSEETITPWNFEEVVDKGASAQSFIERMTNFDKNLPNEKVLPKHSLLYEYFTVYNELTKVKYVTEGMRKPAFLSGEQKKAIVDLLFKTNRKVTVKQLKEDYFKKIECFDSVEISGVEDRFNASLGTYHDLLKIIKDKDFLDNEENEDILEDIVLTLTLFEDREMIEERLKTYAHLFDDKVMKQLKRRRYTGWGRLSRKLINGIRDKQSGKTILDFLKSDGFANRNFMQLIHDDSLTFKEDIQKAQVSGQGDSLHEHIANLAGSPAIKKGILQTVKVVDELVKVMGRHKPENIVIEMARENQTTQKGQKNSRERMKRIEEGIKELGSQILKEHPVENTQLQNEKLYLYYLQNGRDMYVDQELDINRLSDYDVDHIVPQSFLKDDSIDNKVLTRSDKNRGKSDNVPSEEVVKKMKNYWRQLLNAKLITQRKFDNLTKAERGGLSELDKAGFIKRQLVETRQITKHVAQILDSRMNTKYDENDKLIREVKVITLKSKLVSDFRKDFQFYKVREINNYHHAHDAYLNAVVGTALIKKYPKLESEFVYGDYKVYDVRKMIAKSEQEIGKATAKYFFYSNIMNFFKTEITLANGEIRKRPLIETNGETGEIVWDKGRDFATVRKVLSMPQVNIVKKTEVQTGGFSKESILPKRNSDKLIARKKDWDPKKYGGFDSPTVAYSVLVVAKVEKGKSKKLKSVKELLGITIMERSSFEKNPIDFLEAKGYKEVKKDLIIKLPKYSLFELENGRKRMLASAGELQKGNELALPSKYVNFLYLASHYEKLKGSPEDNEQKQLFVEQHKHYLDEIIEQISEFSKRVILADANLDKVLSAYNKHRDKPIREQAENIIHLFTLTNLGAPAAFKYFDTTIDRKRYTSTKEVLDATLIHQSITGLYETRIDLSQLGGD

SEQ ID NO: 6 - protein, 1368 aa, Artificial sequence
  synthetic peptide sequence
MDKKYSIGLAIGTNSVGWAVITDDYKVPSKKFKVLGNTDRHSIKKNLIGALLFDSGETAEATRLKRTARRRYTRRKNRICYLQEIFSNEMAKVDDSFFHRLEESFLVEEDKKHERHPIFGNIVDEVAYHEKYPTIYHLRKKLVDSTDKADLRLIYLALAHMIKFRGHFLIEGDLNPDNSDVDKLFIQLVQTYNQLFEENPINASGVDAKAILSARLSKSRRLENLIAQLPGEKKNSLFGNLIALSLGLTPNFKSNFDLAEDAKLQLSKDTYDDDLDNLLAQIGDQYADLFLAAKNLSDAILLSDILRVNTEITKAPLSASMIKRYDEHHQDLTLLKALVRQQLPEKYKEIFFDQSKNGYAGYIDGGASQEEFYKFIKPILEKMDGTEELLVKLNREDLLRKQRTFDNGSIPHQIHLGELHAILRRQEDFYPFLKDNREKIEKILTFRIPYYVGPLARGNSRFAWMTRKSEETITPWNFEEVVDKGASAQSFIERMTNFDKNLPNEKVLPKHSLLYEYFTVYNELTKVKYVTEGMRKPAFLSGEQKKAIVDLLFKTNRKVTVKQLKEDYFKKIECFDSVEISGVEDRFNASLGTYHDLLKIIKDKDFLDNEENEDILEDIVLTLTLFEDREMIEERLKTYAHLFDDKVMKQLKRRRYTGWGRLSRKLINGIRDKQSGKTILDFLKSDGFANRNFMQLIHDDSLTFKEDIQKAQVSGQGDSLHEHIANLAGSPAIKKGILQTVKVVDELVKVMGRHKPENIVIEMARENQTTQKGQKNSRERMKRIEEGIKELGSQILKEHPVENTQLQNEKLYLYYLQNGRDMYVDQELDINRLSDYDVDHIVPQSFLKDDSIDNKVLTRSDKNRGKSDNVPSEEVVKKMKNYWRQLLNAKLITQRKFDNLTKAERGGLSELDKAGFIKRQLVETRQITKHVAQILDSRMNTKYDENDKLIREVKVITLKSKLVSDFRKDFQFYKVREINNYHHAHDAYLNAVVGTALIKKYPKLESEFVYGDYKVYDVRKMIAKSEQEIGKATAKYFFYSNIMNFFKTEITLANGEIRKRPLIETNGETGEIVWDKGRDFATVRKVLSMPQVNIVKKTEVQTGGFSKESILPKRNSDKLIARKKDWDPKKYGGFDSPTVAYSVLVVAKVEKGKSKKLKSVKELLGITIMERSSFEKNPIDFLEAKGYKEVKKDLIIKLPKYSLFELENGRKRMLASAGELQKGNELALPSKYVNFLYLASHYEKLKGSPEDNEQKQLFVEQHKHYLDEIIEQISEFSKRVILADANLDKVLSAYNKHRDKPIREQAENIIHLFTLTNLGAPAAFKYFDTTIDRKRYTSTKEVLDATLIHQSITGLYETRIDLSQLGGD

SEQ ID NO: 7 - protein, 1368 aa, Artificial sequence
  synthetic peptide sequence
MDKKYSIGLDIGTNSVGWAVITDDYKVPSKKFKVLGNTDRHSIKKNLIGALLFDSGETAEATRLKRTARRRYTRRKNRICYLQEIFSNEMAKVDDSFFHRLEESFLVEEDKKHERHPIFGNIVDEVAYHEKYPTIYHLRKKLVDSTDKADLRLIYLALAHMIKFRGHFLIEGDLNPDNSDVDKLFIQLVQTYNQLFEENPINASGVDAKAILSARLSKSRRLENLIAQLPGEKKNSLFGNLIALSLGLTPNFKSNFDLAEDAKLQLSKDTYDDDLDNLLAQIGDQYADLFLAAKNLSDAILLSDILRVNTEITKAPLSASMIKRYDEHHQDLTLLKALVRQQLPEKYKEIFFDQSKNGYAGYIDGGASQEEFYKFIKPILEKMDGTEELLVKLNREDLLRKQRTFDNGSIPHQIHLGELHAILRRQEDFYPFLKDNREKIEKILTFRIPYYVGPLARGNSRFAWMTRKSEETITPWNFEEVVDKGASAQSFIERMTNFDKNLPNEKVLPKHSLLYEYFTVYNELTKVKYVTEGMRKPAFLSGEQKKAIVDLLFKTNRKVTVKQLKEDYFKKIECFDSVEISGVEDRFNASLGTYHDLLKIIKDKDFLDNEENEDILEDIVLTLTLFEDREMIEERLKTYAHLFDDKVMKQLKRRRYTGWGRLSRKLINGIRDKQSGKTILDFLKSDGFANRNFMQLIHDDSLTFKEDIQKAQVSGQGDSLHEHIANLAGSPAIKKGILQTVKVVDELVKVMGRHKPENIVIEMARENQTTQKGQKNSRERMKRIEEGIKELGSQILKEHPVENTQLQNEKLYLYYLQNGRDMYVDQELDINRLSDYDVDAIVPQSFLKDDSIDNKVLTRSDKNRGKSDNVPSEEVVKKMKNYWRQLLNAKLITQRKFDNLTKAERGGLSELDKAGFIKRQLVETRQITKHVAQILDSRMNTKYDENDKLIREVKVITLKSKLVSDFRKDFQFYKVREINNYHHAHDAYLNAVVGTALIKKYPKLESEFVYGDYKVYDVRKMIAKSEQEIGKATAKYFFYSNIMNFFKTEITLANGEIRKRPLIETNGETGEIVWDKGRDFATVRKVLSMPQVNIVKKTEVQTGGFSKESILPKRNSDKLIARKKDWDPKKYGGFDSPTVAYSVLVVAKVEKGKSKKLKSVKELLGITIMERSSFEKNPIDFLEAKGYKEVKKDLIIKLPKYSLFELENGRKRMLASAGELQKGNELALPSKYVNFLYLASHYEKLKGSPEDNEQKQLFVEQHKHYLDEIIEQISEFSKRVILADANLDKVLSAYNKHRDKPIREQAENIIHLFTLTNLGAPAAFKYFDTTIDRKRYTSTKEVLDATLIHQSITGLYETRIDLSQLGGD

SEQ ID NO: 8 - protein, 1368 aa, Artificial sequence
  synthetic peptide sequence
MDKKYSIGLAIGTNSVGWAVITDDYKVPSKKFKVLGNTDRHSIKKNLIGALLFDSGETAEATRLKRTARRRYTRRKNRICYLQEIFSNEMAKVDDSFFHRLEESFLVEEDKKHERHPIFGNIVDEVAYHEKYPTIYHLRKKLVDSTDKADLRLIYLALAHMIKFRGHFLIEGDLNPDNSDVDKLFIQLVQTYNQLFEENPINASGVDAKAILSARLSKSRRLENLIAQLPGEKKNSLFGNLIALSLGLTPNFKSNFDLAEDAKLQLSKDTYDDDLDNLLAQIGDQYADLFLAAKNLSDAILLSDILRVNTEITKAPLSASMIKRYDEHHQDLTLLKALVRQQLPEKYKEIFFDQSKNGYAGYIDGGASQEEFYKFIKPILEKMDGTEELLVKLNREDLLRKQRTFDNGSIPHQIHLGELHAILRRQEDFYPFLKDNREKIEKILTFRIPYYVGPLARGNSRFAWMTRKSEETITPWNFEEVVDKGASAQSFIERMTNFDKNLPNEKVLPKHSLLYEYFTVYNELTKVKYVTEGMRKPAFLSGEQKKAIVDLLFKTNRKVTVKQLKEDYFKKIECFDSVEISGVEDRFNASLGTYHDLLKIIKDKDFLDNEENEDILEDIVLTLTLFEDREMIEERLKTYAHLFDDKVMKQLKRRRYTGWGRLSRKLINGIRDKQSGKTILDFLKSDGFANRNFMQLIHDDSLTFKEDIQKAQVSGQGDSLHEHIANLAGSPAIKKGILQTVKVVDELVKVMGRHKPENIVIEMARENQTTQKGQKNSRERMKRIEEGIKELGSQILKEHPVENTQLQNEKLYLYYLQNGRDMYVDQELDINRLSDYDVDAIVPQSFLKDDSIDNKVLTRSDKNRGKSDNVPSEEVVKKMKNYWRQLLNAKLITQRKFDNLTKAERGGLSELDKAGFIKRQLVETRQITKHVAQILDSRMNTKYDENDKLIREVKVITLKSKLVSDFRKDFQFYKVREINNYHHAHDAYLNAVVGTALIKKYPKLESEFVYGDYKVYDVRKMIAKSEQEIGKATAKYFFYSNIMNFFKTEITLANGEIRKRPLIETNGETGEIVWDKGRDFATVRKVLSMPQVNIVKKTEVQTGGFSKESILPKRNSDKLIARKKDWDPKKYGGFDSPTVAYSVLVVAKVEKGKSKKLKSVKELLGITIMERSSFEKNPIDFLEAKGYKEVKKDLIIKLPKYSLFELENGRKRMLASAGELQKGNELALPSKYVNFLYLASHYEKLKGSPEDNEQKQLFVEQHKHYLDEIIEQISEFSKRVILADANLDKVLSAYNKHRDKPIREQAENIIHLFTLTNLGAPAAFKYFDTTIDRKRYTSTKEVLDATLIHQSITGLYETRIDLSQLGGD

SEQ ID NO: 9 - protein, 1368 aa, Artificial sequence
  synthetic peptide sequence
MDKKYSIGLDIGTNSVGWAVITDDYKVPSKKFKVLGNTDRHSIKKNLIGALLFDSGETAEATRLKRTARRRYTRRKNRICYLQEIFSNEMAKVDDSFFHRLEESFLVEEDKKHERHPIFGNIVDEVAYHEKYPTIYHLRKKLVDSTDKADLRLIYLALAHMIKFRGHFLIEGDLNPDNSDVDKLFIQLVQTYNQLFEENPINASGVDAKAILSARLSKSRRLENLIAQLPGEKKNSLFGNLIALSLGLTPNFKSNFDLAEDAKLQLSKDTYDDDLDNLLAQIGDQYADLFLAAKNLSDAILLSDILRVNTEITKAPLSASMIKRYDEHHQDLTLLKALVRQQLPEKYKEIFFDQSKNGYAGYIDGGASQEEFYKFIKPILEKMDGTEELLVKLNREDLLRKQRTFDNGSIPHQIHLGELHAILRRQEDFYPFLKDNREKIEKILTFRIPYYVGPLARGNSRFAWMTRKSEETITPANFEEVVDKGASAQSFIERMTNFDKNLPNEKVLPKHSLLYEYFTVYNELTKVKYVTEGMRKPAFLSGEQKKAIVDLLFKTNRKVTVKQLKEDYFKKIECFDSVEISGVEDRFNASLGTYHDLLKIIKDKDFLDNEENEDILEDIVLTLTLFEDREMIEERLKTYAHLFDDKVMKQLKRRRYTGWGRLSRKLINGIRDKQSGKTILDFLKSDGFANRNFMQLIHDDSLTFKEDIQKAQVSGQGDSLHEHIANLAGSPAIKKGILQTVKVVDELVKVMGRHKPENIVIEMARENQTTQKGQKNSRERMKRIEEGIKELGSQILKEHPVENTQLQNEKLYLYYLQNGRDMYVDQELDINRLSDYDVDHIVPQSFLKDDSIDNKVLTRSDKNRGKSDNVPSEEVVKKMKNYWRQLLNAKLITQRKFDNLTKAERGGLSELDKAGFIKRQLVETRQITKHVAQILDSRMNTKYDENDKLIREVKVITLKSKLVSDFRKDFQFYKVREINNYHHAHDAYLNAVVGTALIKKYPKLESEFVYGDYKVYDVRKMIAKSEQEIGKATAKYFFYSNIMNFFKTEITLANGEIRKRPLIETNGETGEIVWDKGRDFATVRKVLSMPQVNIVKKTEVQTGGFSKESILPKRNSDKLIARKKDADPKKYGGFDSPTVAYSVLVVAKVEKGKSKKLKSVKELLGITIMERSSFEKNPIDFLEAKGYKEVKKDLIIKLPKYSLFELENGRKRMLASAGELQKGNELALPSKYVNFLYLASHYEKLKGSPEDNEQKQLFVEQHKHYLDEIIEQISEFSKRVILADANLDKVLSAYNKHRDKPIREQAENIIHLFTLTNLGAPAAFKYFDTTIDRKRYTSTKEVLDATLIHQSITGLYETRIDLSQLGGD

SEQ ID NO: 10 - protein, 1368 aa, Artificial sequence
  synthetic peptide sequence
MDKKYSIGLDIGTNSVGWAVITDDYKVPSKKFKVLGNTDRHSIKKNLIGALLFDSGETAEATRLKRTARRRYTRRKNRICYLQEIFSNEMAKVDDSFFHRLEESFLVEEDKKHERHPIFGNIVDEVAYHEKYPTIYHLRKKLVDSTDKADLRLIYLALAHMIKFRGHFLIEGDLNPDNSDVDKLFIQLVQTYNQLFEENPINASGVDAKAILSARLSKSRRLENLIAQLPGEKKNSLFGNLIALSLGLTPNFKSNFDLAEDAKLQLSKDTYDDDLDNLLAQIGDQYADLFLAAKNLSDAILLSDILRVNTEITKAPLSASMIKRYDEHHQDLTLLKALVRQQLPEKYKEIFFDQSKNGYAGYIDGGASQEEFYKFIKPILEKMDGTEELLVKLNREDLLRKQRTFDNGSIPHQIHLGELHAILRRQEDFYPFLKDNREKIEKILTFRIPYYVGPLARGNSRFAWMTRKSEETITAAAFEEVVDKGASAQSFIERMTNFDKNLPNEKVLPKHSLLYEYFTVYNELTKVKYVTEGMRKPAFLSGEQKKAIVDLLFKTNRKVTVKQLKEDYFKKIECFDSVEISGVEDRFNASLGTYHDLLKIIKDKDFLDNEENEDILEDIVLTLTLFEDREMIEERLKTYAHLFDDKVMKQLKRRRYTGWGRLSRKLINGIRDKQSGKTILDFLKSDGFANRNFMQLIHDDSLTFKEDIQKAQVSGQGDSLHEHIANLAGSPAIKKGILQTVKVVDELVKVMGRHKPENIVIEMARENQTTQKGQKNSRERMKRIEEGIKELGSQILKEHPVENTQLQNEKLYLYYLQNGRDMYVDQELDINRLSDYDVDHIVPQSFLKDDSIDNKVLTRSDKNRGKSDNVPSEEVVKKMKNYWRQLLNAKLITQRKFDNLTKAERGGLSELDKAGFIKRQLVETRQITKHVAQILDSRMNTKYDENDKLIREVKVITLKSKLVSDFRKDFQFYKVREINNYHHAHDAYLNAVVGTALIKKYPKLESEFVYGDYKVYDVRKMIAKSEQEIGKATAKYFFYSNIMNFFKTEITLANGEIRKRPLIETNGETGEIVWDKGRDFATVRKVLSMPQVNIVKKTEVQTGGFSKESILPKRNSDKLIARKKAAAPKKYGGFDSPTVAYSVLVVAKVEKGKSKKLKSVKELLGITIMERSSFEKNPIDFLEAKGYKEVKKDLIIKLPKYSLFELENGRKRMLASAGELQKGNELALPSKYVNFLYLASHYEKLKGSPEDNEQKQLFVEQHKHYLDEIIEQISEFSKRVILADANLDKVLSAYNKHRDKPIREQAENIIHLFTLTNLGAPAAFKYFDTTIDRKRYTSTKEVLDATLIHQSITGLYETRIDLSQLGGD

SEQ ID NO: 11 - protein, 1368 aa, Artificial sequence
  synthetic peptide sequence
MDKKYSIGLDIGTNSVGWAVITDDYKVPSKKFKVLGNTDRHSIKKNLIGALLFDSGETAEATRLKRTARRRYTRRKNRICYLQEIFSNEMAKVDDSFFHRLEESFLVEEDKKHERHPIFGNIVDEVAYHEKYPTIYHLRKKLVDSTDKADLRLIYLALAHMIKFRGHFLIEGDLNPDNSDVDKLFIQLVQTYNQLFEENPINASGVDAKAILSARLSKSRRLENLIAQLPGEKKNSLFGNLIALSLGLTPNFKSNFDLAEDAKLQLSKDTYDDDLDNLLAQIGDQYADLFLAAKNLSDAILLSDILRVNTEITKAPLSASMIKRYDEHHQDLTLLKALVRQQLPEKYKEIFFDQSKNGYAGYIDGGASQEEFYKFIKPILEKMDGTEELLVKLNREDLLRKQRTFDNGSIPHQIHLGELHAILRRQEDFYPFLKDNREKIEKILTFRIPYYVGPLARGNSRFAWMTRKSEETITPANFEEVVDKGASAQSFIERMTNFDKNLPNEKVLPKHSLLYEYFTVYNELTKVKYVTEGMRKPAFLSGEQKKAIVDLLFKTNRKVTVKQLKEDYFKKIECFDSVEISGVEDRFNASLGTYHDLLKIIKDKDFLDNEENEDILEDIVLTLTLFEDREMIEERLKTYAHLFDDKVMKQLKRRRYTGWGRLSRKLINGIRDKQSGKTILDFLKSDGFANRNFMQLIHDDSLTFKEDIQKAQVSGQGDSLHEHIANLAGSPAIKKGILQTVKVVDELVKVMGRHKPENIVIEMARENQTTQKGQKNSRERMKRIEEGIKELGSQILKEHPVENTQLQNEKLYLYYLQNGRDMYVDQELDINRLSDYDVDAIVPQSFLKDDSIDNKVLTRSDKNRGKSDNVPSEEVVKKMKNYWRQLLNAKLITQRKFDNLTKAERGGLSELDKAGFIKRQLVETRQITKHVAQILDSRMNTKYDENDKLIREVKVITLKSKLVSDFRKDFQFYKVREINNYHHAHDAYLNAVVGTALIKKYPKLESEFVYGDYKVYDVRKMIAKSEQEIGKATAKYFFYSNIMNFFKTEITLANGEIRKRPLIETNGETGEIVWDKGRDFATVRKVLSMPQVNIVKKTEVQTGGFSKESILPKRNSDKLIARKKDADPKKYGGFDSPTVAYSVLVVAKVEKGKSKKLKSVKELLGITIMERSSFEKNPIDFLEAKGYKEVKKDLIIKLPKYSLFELENGRKRMLASAGELQKGNELALPSKYVNFLYLASHYEKLKGSPEDNEQKQLFVEQHKHYLDEIIEQISEFSKRVILADANLDKVLSAYNKHRDKPIREQAENIIHLFTLTNLGAPAAFKYFDTTIDRKRYTSTKEVLDATLIHQSITGLYETRIDLSQLGGD

SEQ ID NO: 12 - protein, 1368 aa, Artificial sequence
  synthetic peptide sequence
MDKKYSIGLAIGTNSVGWAVITDDYKVPSKKFKVLGNTDRHSIKKNLIGALLFDSGETAEATRLKRTARRRYTRRKNRICYLQEIFSNEMAKVDDSFFHRLEESFLVEEDKKHERHPIFGNIVDEVAYHEKYPTIYHLRKKLVDSTDKADLRLIYLALAHMIKFRGHFLIEGDLNPDNSDVDKLFIQLVQTYNQLFEENPINASGVDAKAILSARLSKSRRLENLIAQLPGEKKNSLFGNLIALSLGLTPNFKSNFDLAEDAKLQLSKDTYDDDLDNLLAQIGDQYADLFLAAKNLSDAILLSDILRVNTEITKAPLSASMIKRYDEHHQDLTLLKALVRQQLPEKYKEIFFDQSKNGYAGYIDGGASQEEFYKFIKPILEKMDGTEELLVKLNREDLLRKQRTFDNGSIPHQIHLGELHAILRRQEDFYPFLKDNREKIEKILTFRIPYYVGPLARGNSRFAWMTRKSEETITPANFEEVVDKGASAQSFIERMTNFDKNLPNEKVLPKHSLLYEYFTVYNELTKVKYVTEGMRKPAFLSGEQKKAIVDLLFKTNRKVTVKQLKEDYFKKIECFDSVEISGVEDRFNASLGTYHDLLKIIKDKDFLDNEENEDILEDIVLTLTLFEDREMIEERLKTYAHLFDDKVMKQLKRRRYTGWGRLSRKLINGIRDKQSGKTILDFLKSDGFANRNFMQLIHDDSLTFKEDIQKAQVSGQGDSLHEHIANLAGSPAIKKGILQTVKVVDELVKVMGRHKPENIVIEMARENQTTQKGQKNSRERMKRIEEGIKELGSQILKEHPVENTQLQNEKLYLYYLQNGRDMYVDQELDINRLSDYDVDAIVPQSFLKDDSIDNKVLTRSDKNRGKSDNVPSEEVVKKMKNYWRQLLNAKLITQRKFDNLTKAERGGLSELDKAGFIKRQLVETRQITKHVAQILDSRMNTKYDENDKLIREVKVITLKSKLVSDFRKDFQFYKVREINNYHHAHDAYLNAVVGTALIKKYPKLESEFVYGDYKVYDVRKMIAKSEQEIGKATAKYFFYSNIMNFFKTEITLANGEIRKRPLIETNGETGEIVWDKGRDFATVRKVLSMPQVNIVKKTEVQTGGFSKESILPKRNSDKLIARKKDADPKKYGGFDSPTVAYSVLVVAKVEKGKSKKLKSVKELLGITIMERSSFEKNPIDFLEAKGYKEVKKDLIIKLPKYSLFELENGRKRMLASAGELQKGNELALPSKYVNFLYLASHYEKLKGSPEDNEQKQLFVEQHKHYLDEIIEQISEFSKRVILADANLDKVLSAYNKHRDKPIREQAENIIHLFTLTNLGAPAAFKYFDTTIDRKRYTSTKEVLDATLIHQSITGLYETRIDLSQLGGD

SEQ ID NO: 13 - protein, 1368 aa, Artificial sequence
  synthetic peptide sequence
MDKKYSIGLDIGTNSVGWAVITDDYKVPSKKFKVLGNTDRHSIKKNLIGALLFDSGETAEATRLKRTARRRYTRRKNRICYLQEIFSNEMAKVDDSFFHRLEESFLVEEDKKHERHPIFGNIVDEVAYHEKYPTIYHLRKKLVDSTDKADLRLIYLALAHMIKFRGHFLIEGDLNPDNSDVDKLFIQLVQTYNQLFEENPINASGVDAKAILSARLSKSRRLENLIAQLPGEKKNSLFGNLIALSLGLTPNFKSNFDLAEDAKLQLSKDTYDDDLDNLLAQIGDQYADLFLAAKNLSDAILLSDILRVNTEITKAPLSASMIKRYDEHHQDLTLLKALVRQQLPEKYKEIFFDQSKNGYAGYIDGGASQEEFYKFIKPILEKMDGTEELLVKLNREDLLRKQRTFDNGSIPHQIHLGELHAILRRQEDFYPFLKDNREKIEKILTFRIPYYVGPLARGNSRFAWMTRKSEETITAAAFEEVVDKGASAQSFIERMTNFDKNLPNEKVLPKHSLLYEYFTVYNELTKVKYVTEGMRKPAFLSGEQKKAIVDLLFKTNRKVTVKQLKEDYFKKIECFDSVEISGVEDRFNASLGTYHDLLKIIKDKDFLDNEENEDILEDIVLTLTLFEDREMIEERLKTYAHLFDDKVMKQLKRRRYTGWGRLSRKLINGIRDKQSGKTILDFLKSDGFANRNFMQLIHDDSLTFKEDIQKAQVSGQGDSLHEHIANLAGSPAIKKGILQTVKVVDELVKVMGRHKPENIVIEMARENQTTQKGQKNSRERMKRIEEGIKELGSQILKEHPVENTQLQNEKLYLYYLQNGRDMYVDQELDINRLSDYDVDAIVPQSFLKDDSIDNKVLTRSDKNRGKSDNVPSEEVVKKMKNYWRQLLNAKLITQRKFDNLTKAERGGLSELDKAGFIKRQLVETRQITKHVAQILDSRMNTKYDENDKLIREVKVITLKSKLVSDFRKDFQFYKVREINNYHHAHDAYLNAVVGTALIKKYPKLESEFVYGDYKVYDVRKMIAKSEQEIGKATAKYFFYSNIMNFFKTEITLANGEIRKRPLIETNGETGEIVWDKGRDFATVRKVLSMPQVNIVKKTEVQTGGFSKESILPKRNSDKLIARKKAAAPKKYGGFDSPTVAYSVLVVAKVEKGKSKKLKSVKELLGITIMERSSFEKNPIDFLEAKGYKEVKKDLIIKLPKYSLFELENGRKRMLASAGELQKGNELALPSKYVNFLYLASHYEKLKGSPEDNEQKQLFVEQHKHYLDEIIEQISEFSKRVILADANLDKVLSAYNKHRDKPIREQAENIIHLFTLTNLGAPAAFKYFDTTIDRKRYTSTKEVLDATLIHQSITGLYETRIDLSQLGGD

SEQ ID NO: 14 - protein, 1368 aa, Artificial sequence
  synthetic peptide sequence
MDKKYSIGLAIGTNSVGWAVITDDYKVPSKKFKVLGNTDRHSIKKNLIGALLFDSGETAEATRLKRTARRRYTRRKNRICYLQEIFSNEMAKVDDSFFHRLEESFLVEEDKKHERHPIFGNIVDEVAYHEKYPTIYHLRKKLVDSTDKADLRLIYLALAHMIKFRGHFLIEGDLNPDNSDVDKLFIQLVQTYNQLFEENPINASGVDAKAILSARLSKSRRLENLIAQLPGEKKNSLFGNLIALSLGLTPNFKSNFDLAEDAKLQLSKDTYDDDLDNLLAQIGDQYADLFLAAKNLSDAILLSDILRVNTEITKAPLSASMIKRYDEHHQDLTLLKALVRQQLPEKYKEIFFDQSKNGYAGYIDGGASQEEFYKFIKPILEKMDGTEELLVKLNREDLLRKQRTFDNGSIPHQIHLGELHAILRRQEDFYPFLKDNREKIEKILTFRIPYYVGPLARGNSRFAWMTRKSEETITAAAFEEVVDKGASAQSFIERMTNFDKNLPNEKVLPKHSLLYEYFTVYNELTKVKYVTEGMRKPAFLSGEQKKAIVDLLFKTNRKVTVKQLKEDYFKKIECFDSVEISGVEDRFNASLGTYHDLLKIIKDKDFLDNEENEDILEDIVLTLTLFEDREMIEERLKTYAHLFDDKVMKQLKRRRYTGWGRLSRKLINGIRDKQSGKTILDFLKSDGFANRNFMQLIHDDSLTFKEDIQKAQVSGQGDSLHEHIANLAGSPAIKKGILQTVKVVDELVKVMGRHKPENIVIEMARENQTTQKGQKNSRERMKRIEEGIKELGSQILKEHPVENTQLQNEKLYLYYLQNGRDMYVDQELDINRLSDYDVDAIVPQSFLKDDSIDNKVLTRSDKNRGKSDNVPSEEVVKKMKNYWRQLLNAKLITQRKFDNLTKAERGGLSELDKAGFIKRQLVETRQITKHVAQILDSRMNTKYDENDKLIREVKVITLKSKLVSDFRKDFQFYKVREINNYHHAHDAYLNAVVGTALIKKYPKLESEFVYGDYKVYDVRKMIAKSEQEIGKATAKYFFYSNIMNFFKTEITLANGEIRKRPLIETNGETGEIVWDKGRDFATVRKVLSMPQVNIVKKTEVQTGGFSKESILPKRNSDKLIARKKAAAPKKYGGFDSPTVAYSVLVVAKVEKGKSKKLKSVKELLGITIMERSSFEKNPIDFLEAKGYKEVKKDLIIKLPKYSLFELENGRKRMLASAGELQKGNELALPSKYVNFLYLASHYEKLKGSPEDNEQKQLFVEQHKHYLDEIIEQISEFSKRVILADANLDKVLSAYNKHRDKPIREQAENIIHLFTLTNLGAPAAFKYFDTTIDRKRYTSTKEVLDATLIHQSITGLYETRIDLSQLGGD

SEQ ID NO: 15 - protein, 1368 aa, Streptococcus pyogenes [sequence omitted]

SEQ ID NO: 16 - protein, 1367 aa, Streptococcus pyogenes
MDKKYSIGLDIGTNSVGWAVITDDYKVPSKKLKVLGNTDRHGIKKNLIGALLFDSGETAEATRLKRTARRRYTRRKNRICYLQEIFSNEMAKVDDSFFHRLEESFLVEEDKKHERHPIFGNIVDEVAYHEKYPTIYHLRKKLADSTDKVDLRLIYLALAHMIKFRGHFLIEGDLNPDNSDVDKLFIQLVQTYNQLFEENPINASRVDAKAILSARLSKSRRLENLIAQLPGEKKNGLFGNLIALSLGLTPNFKSNFDLAEDAKLQLSKDTYDDDLDNLLAQIGDQYADLFLAAKNLSDAILLSDILRVNSEITKAPLSASMIKRYDEHHQDLTLLKALVRQQLPEKYKEIFFDQSKNGYAGYIDGGASQEEFYKFIKPILEKMDGTEELLAKLNREDLLRKQRTFDNGSIPYQIHLGELHAILRRQEDFYPFLKDNREKIEKILTFRIPYYVGPLARGNSRFAWMTRKSEETITPWNFEEVVDKGASAQSFIERMTNFDKNLPNEKVLPKHSLLYEYFTVYNELTKVKYVTEGMRKPAFLSGEQKKAIVDLLFKTNRKVTVKQLKEDYFKKIECFDSVEISGVEDRFNTSLGTYHDLLKIIKDKDFLDNEENEDILEDIVLTLTLFEDKEMIEERLKKYANLFDDKVMKQLKRRHYTGWGRLSRKLINGIRDKQSGKTILDFLKSDGFANRNFMQLINDDSLTFKEAIQKAQVSGQGHSLHEQIANLAGSPAIKKGILQTVKIVDELVKVMGHKPENIVIEMARENQTTQKGQKNSRERMKRIEEGIKELGSQILKEHPVENTQLQNEKLYLYYLQNGRDMYVDQELDINRLSDYDVDHIVPQSFLKDDSIDNKVLTRSDKNRGKSDNVPSEEVVKKMKNYWRQLLNAKLITQRKFDNLTKAERGGLSELDKAGFIKRQLVETRQITKHVAQILDSRMNTKYDENDKLIREVKVITLKSKLVSDFRKDFQFYKVREINNYHHAHDAYLNAVVGTALIKKYPKLESEFVYGDYKVYDVRKMIAKSEQEIGKATAKYFFYSNIMNFFKTEITLANGEIRKRPLIETNGETGEIVWDKGRDFATVRKVLSMPQVNIVKKTEVQTGGFSKESILPKRNSDKLIARKKDWDPKKYGGFDSPTVAYSVLVVAKVEKGKSKKLKSVKELLGITIMERSSFEKNPIDFLEAKGYKEVRKDLIIKLPKYSLFELENGRKRMLASAGELQKGNELALPSKYVNFLYLASHYEKLKGSPEDNEQKQLFVEQHKHYLDEIIEQISEFSKRVILADANLDKVLSAYNKHRDKPIREQAKNIIHLFTLTNLGAPAAFKYFDTTIERNRYKSIKEVLDATLIHQSITGLYEIRIDLSQLGGD

SEQ ID NO: 17 - protein, 1056 aa, Pasteurella multocida
MQTTNLSYILGLDLGIASVGWAVVEINENEDPIGLIDVGVRIFERAEVPKTGESLALSRRLARSTRRLIRRRAHRLLLAKRFLKREGILSTIDLEKGLPNQAWELRVAGLERRLSAIEWGAVLLHLIKHRGYLSKRKNESQTNNKELGALLSGVAQNHQLLQSDDYRTPAELALKKFAKEEGHIRNQRGAYTHTFNRLDLLAELNLLFAQQHQFGNPHCKEHIQQYMTELLMWQKPALSGEAILKMLGKCTHEKNEFKAAKHTYSAERFVWLTKLNNLRILEDGAERALNEEERQLLINHPYEKSKLTYAQVRKLLGLSEQAIFKHLRYSKENAESATFMELKAWHAIRKALENQGLKDTWQDLAKKPDLLDEIGTAFSLYKTDEDIQQYLTNKVPNSVINALLVSLNFDKFIELSLKSLRKILPLMEQGKRYDQACREIYGHHYGEANQKTSQLLPAIPAQEIRNPVVLRTLSQARKVINAIIRQYGSPARVHIETGRELGKSFKERREIQKQQEDNRTKRESAVQKFKELFSDFSSEPKSKDILKFRLYEQQHGKCLYSGKEINIHRLNEKGYVEIDHALPFSRTWDDSFNNKVLVLASENQNKGNQTPYEWLQGKINSERWKNFVALVLGSQCSAAKKQRLLTQVIDDNKFIDRNLNDTRYIARFLSNYIQENLLLVGKNKKNVFTPNGQITALLRSRWGLIKARENNNRHHALDAIVVACATPSMQQKITRFIRFKEVHPYKIENRYEMVDQESGEIISPHFPEPWAYFRQEVNIRVFDNHPDTVLKEMLPDRPQANHQFVQPLFVSRAPTRKMSGQGHMETIKSAKRLAEGISVLRIPLTQLKPNLLENMVNKEREPALYAGLKARLAEFNQDPAKAFATPFYKQGGQQVKAIRVEQVQKSGVLVRENNGVADNASIVRTDVFIKNNKFFLVPIYTWQVAKGILPNKAIVAHKNEDEWEEMDEGAKFKFSLFPNDLVELKTKKEYFFGYYIGLDRATGNISLKEHDGEISKGKDGVYRVGVKLALSFEKYQVDELGKNRQICRPQQRQPVR

SEQ ID NO: 18 - protein, 1368 aa, Streptococcus pyogenes
MDKKYSIGLDIGTNSVGWAVITDDYKVPSKKLKGLGNTDRHGIKKNLIGALLFDSGETAEATRLKRTARRRYTRRKNRICYLQEIFSNEMAKVDDSFFHRLEESFLVEEDKKHERHPIFGNIVDEVAYHEKYPTIYHLRKKLADSTDKVDLRLIYLALAHMIKFRGHFLIEGDLNPDNSDVDKLFIQLVQTYNQLFEENPINASRVDAKAILSARLSKSRRLENLIAQLPGEKKNGLFGNLIALSLGLTPNFKSNFDLAEDAKLQLSKDTYDDDLDNLLAQIGDQYADLFLAAKNLSDATLLSDILRVNSEITKAPLSASMIKRYDEHHQDLTLLKALVRQQLPEKYKEIFFDQSKNGYAGYIDGGASQEEFYKFIKPILEKMDGTEELLAKLNREDLLRKQRTFDNGSIPYQIHLGELHAILRRQEDFYPFLKDNREKIEKILTFRIPYYVGPLARGNSRFAWMTRKSEETITPWNFEEVVDKGASAQSFIERMTNFDKNLPNEKVLPKHSLLYEYFTVYNELTKVKYVTEGMRKPAFLSGEQKKAIVDLLFKTNRKVTVKQLKEDYFKKIECFDSVEISGVEDRFNASLGTYHDLLKIIKDKDFLDNEENEDILEDIVLTLTLFEDREMIEERLKTYAHLFDDKVMKQLKRRRYTGWGRLSRKLINGIRDKQSGKTILDFLKSDGFANRNFMQLIHDDSLTFKEDIQKAQVSGQGDSLHEHIANLAGSPAIKKGILQTVKVVDELVKVMGRHKPENIVIEMARENQTTQKGQKNSRERMKRIEEGIKELGSDILKEYPVENTQLQNEKLYLYYLQNGRDMYVDQELDINRLSDYDVDHIVPQSFLKDDSIDNKVLTRSDKNRGKSDNVPSEEVVKKMKNYWRQLLNAKLITQRKFDNLTKAERGGLSELDKVGFIKRQLVETRQITKHVAQILDSRMNTKYDENDKLIREVRVITLKSKLVSDFRKDFQFYKVREINNYHHAHDAYLNAVVGTALIKKYPKLESEFVYGDYKVYDVRKMIAKSEQEIGKATAKYFFYSNIMNFFKTEITLANGEIRKRPLIETNGETGEIVWDKGRDFATVRKVLSMPQVNIVKKTEVQTGGFSKESILPKRNSDKLIARKKDWDPKKYGGFDSPTVAYSVLVVAKVEKGKSKKLKSVKELLGITIMERSSFEKDPIDFLEAKGYKEVRKDLIIKLPKYSLFELENGRKRMLASAGELQKGNELALPSKYVNFLYLASHYEKLKGSPEDNEQKQLFVEQHKHYLDEIIEQISEFSKRVILADANLDKVLSAYNKHRDKPIREQAENIIHLFTLTNLGAPAAFKYFDTTIDRKRYTSTKEVLDATLIHQSITGLYETRIDLSQLGGD

SEQ ID NO: 19 - protein, 1334 aa, Listeria innocua
MKKPYTIGLDIGTNSVGWAVLTDQYDLVKRKMKIAGDSEKKQIKKNFWGVRLFDEGQTAADRRMARTARRRIERRRNRISYLQGIFAEEMSKTDANFFCRLSDSFYVDNEKRNSRHPFFATIEEEVEYHKNYPTIYHLREELVNSSEKADLRLVYLALAHIIKYRGNFLIEGALDTQNTSVDGIYKQFIQTYNQVFASGIEDGSLKKLEDNKDVAKILVEKVTRKEKLERILKLYPGEKSAGMFAQFISLIVGSKGNFQKPFDLIEKSDIECAKDSYEEDLESLLALIGDEYAELFVAAKNAYSAVVLSSIITVAETETNAKLSASMIERFDTHEEDLGELKAFIKLHLPKHYEEIFSNTEKHGYAGYIDGKTKQADFYKYMKMTLENIEGADYFIAKIEKENFLRKQRTFDNGAIPHQLHLEELEAILHQQAKYYPFLKENYDKIKSLVTFRIPYFVGPLANGQSEFAWLTRKADGEIRPWNIEEKVDFGKSAVDFIEKMTNKDTYLPKENVLPKHSLCYQKYLVYNELTKVRYINDQGKTSYFSGQEKEQIFNDLFKQKRKVKKKDLELFLRNMSHVESPTIEGLEDSFNSSYSTYHDLLKVGIKQEILDNPVNTEMLENIVKILTVFEDKRMIKEQLQQFSDVLDGVVLKKLERRHYTGWGRLSAKLLMGIRDKQSHLTILDYLMNDDGLNRNLMQLINDSNLSFKSIIEKEQVTTADKDIQSIVADLAGSPAIKKGILQSLKIVDELVSVMGYPPQTIVVEMARENQTTGKGKNNSRPRYKSLEKAIKEFGSQILKEHPTDNQELRNNRLYLYYLQNGKDMYTGQDLDIHNLSNYDIDHIVPQSFITDNSIDNLVLTSSAGNREKGDDVPPLEIVRKRKVFWEKLYQGNLMSKRKFDYLTKAERGGLTEADKARFIHRQLVETRQITKNVANILHQRFNYEKDDHGNTMKQVRIVTLKSALVSQFRKQFQLYKVRDVNDYHHAHDAYLNGVVANTLLKVYPQLEPEFVYGDYHQFDWFKANKATAKKQFYTNIMLFFAQKDRIIDENGEILWDKKYLDTVKKVMSYRQMNIVKKTEIQKGEFSKATIKPKGNSSKLIPRKTNWDPMKYGGLDSPNMAYAVVIEYAKGKNKLVFEKKIIRVTIMERKAFEKDEKAFLEEQGYRQPKVLAKLPKYTLYECEEGRRRMLASANEAQKGNQQVLPNHLVTLLHHAANCEVSDGKSLDYIESNREMFAELLAHVSEFAKRYTLAEANLNKINQLFEQNKEGDIKAIAQSFVDLMAFNAMGAPASFKFFETTIERKRYNNLKELLNSTIIYQSITGLYESRKRLDD

SEQ ID NO: 20 - protein, 1368 aa, Streptococcus pyogenes; identical to SEQ ID NO: 18

SEQ ID NO: 21 - protein, 1370 aa, Streptococcus agalactiae
MNKPYSIGLDIGTNSVGWSIITDDYKVPAKKMRVLGNTDKEYIKKNLIGALLFDGGNTAADRRLKRTARRRYTRRRNRILYLQEIFAEEMSKVDDSFFHRLEDSFLVEEDKRGSKYPIFATLQEEKDYHEKFSTIYHLRKELADKKEKADLRLIYIALAHIIKFRGHFLIEDDSFDVRNTDISKQYQDFLEIFNTTFENNDLLSQNVDVEAILTDKISKSAKKDRILAQYPNQKSTGIFAEFLKLIVGNQADFKKYFNLEDKTPLQFAKDSYDEDLENLLGQIGDEFADLFSAAKKLYDSVLLSGILTVIDLSTKAPLSASMIQRYDEHREDLKQLKQFVKASLPEKYQEIFADSSKDGYAGYIEGKTNQEAFYKYLSKLLTKQEDSENFLEKIKNEDFLRKQRTFDNGSIPHQVHLTELKAIIRRQSEYYPFLKENQDRIEKILTFRIPYYIGPLAREKSDFAWMTRKTDDSIRPWNFEDLVDKEKSAEAFIHRMTNNDFYLPEEKVLPKHSLIYEKFTVYNELTKVRYKNEQGETYFFDSNIKQEIFDGVFKEHRKVSKKKLLDFLAKEYEEFRIVDVIGLDKENKAFNASLGTYHDLEKILDKDFLDNPDNESILEDIVQTLTLFEDREMIKKRLENYKDLFTESQLKKLYRRHYTGWGRLSAKLINGIRDKESQKTILDYLIDDGRSNRNFMQLINDDGLSFKSIISKAQAGSHSDNLKEVVGELAGSPAIKKGILQSLKIVDELVKVMGYEPEQIVVEMARENQTTNQGRRNSRQRYKLLDDGVKNLASDLNGNILKEYPTDNQALQNERLFLYYLQNGRDMYTGEALDIDNLSQYDIDHIIPQAFIKDDSIDNRVLVSSAKNRGKSDDVPSLEIVKDCKVFWKKLLDAKLMSQRKYDNLTKAERGGLTSDDKARFIQRQLVETRQITKHVARILDERFNNELDSKGRRIRKVKIVTLKSNLVSNFRKEFGFYKIREVNNYHHAHDAYLNAVVAKAILTKYPQLEPEFVYGDYPKYNSYKTRKSATEKLFFYSNIMNFFKTKVTLADGTVVVKDDIEVNNDTGEIVWDKKKHFATVRKVLSYPQNNIVKKTEIQTGGFSKESILAHGNSDKLIPRKTKDIYLDPKKYGGFDSPIVAYSVLVVADIKKGKAQKLKTVTELLGITIMERSRFEKNPSAFLESKGYLNIRADKLIILPKYSLFELENGRRRLLASAGELQKGNELALPTQFMKFLYLASRYNESKGKPEEIEKKQEFVNQHVSYFDDILQLINDFSKRVILADANLEKINKLYQDNKENISVDELANNIINLFTFTSLGAPAAFKFFDKIVDRKRYTSTKEVLNSTLIHQSITGLYETRIDLGKLGED

SEQ ID NO: 22 - protein, 1345 aa, Streptococcus mutans
MKKPYSIGLDIGTNSVGWAVVTDDYKVPAKKMKVLGNTDKSHIEKNLLGALLFDSGNTAEDRRLKRTARRRYTRRRNRILYLQEIFSEEMGKVDDSFFHRLEDSFLVTEDKRGERHPIFGNLEEEVKYHENFPTIYHLRQYLADNPEKVDLRLVYLALAHIIKFRGHFLIEGKFDTRNNDVQRLFQEFLAVYDNTFENSSLQEQNVQVEEILTDKISKSAKKDRVLKLFPNEKSNGRFAEFLKLIVGNQADFKKHFELEEKAPLQFSKDTYEEELEVLLAQIGDNYAELFLSAKKLYDSILLSGILTVTDVGTKAPLSASMIQRYNEHQMDLAQLKQFIRQKLSDKYNEVFSDVSKDGYAGYIDGKTNQEAFYKYLKGLLNKIEGSGYFLDKIEREDFLRKQRTFDNGSIPHQIHLQEMRAIIRRQAEFYPFLADNQDRIEKLLTFRIPYYVGPLARGKSDFAWLSRKSADKITPWNFDEIVDKESSAEAFINRMTNYDLYLPNQKVLPKHSLLYEKFTVYNELTKVKYKTEQGKTAFFDANMKQEIFDGVFKVYRKVTKDKLMDFLEKEFDEFRIVDLTGLDKENKVFNASYGTYHDLCKILDKDFLDNSKNEKILEDIVLTLTLFEDREMIRKRLENYSDLLTKEQVKKLERRHYTGWGRLSAELIHGIRNKESRKTILDYLIDDGNSNRNFMQLINDDALSFKEEIAKAQVIGETDNLNQVVSDIAGSPAIKKGILQSLKIVDELVKIMGHQPENIVVEMARENQFTNQGRRNSQQRLKGLTDSIKEFGSQILKEHPVENSQLQNDRLFLYYLQNGRDMYTGEELDIDYLSQYDIDHIIPQAFIKDNSIDNRVLTSSKENRGKSDDVPSKDVVRKMKSYWSKLLSAKLITQRKFDNLTKAERGGLTDDDKAGFIKRQLVETRQITKHVARILDERFNTETDENNKKIRQVKIVTLKSNLVSNFRKEFELYKVREINDYHHAHDAYLNAVIGKALLGVYPQLEPEFVYGDYPHFHGHKENKATAKKFFYSNIMNFFKKDDVRTDKNGEIIWKKDEHISNIKKVLSYPQVNIVKKVEEQTGGFSKESILPKGNSDKLIPRKTKKFYWDTKKYGGFDSPIVAYSILVIADIEKGKSKKLKTVKALVGVTIMEKMTFERDPVAFLERKGYRNVQEENIIKLPKYSLFKLENGRKRLLASARELQKGNEIVLPNHLGTLLYHAKNIHKVDEPKHLDYVDKHKDEFKELLDVVSNFSKKYTLAEGNLEKIKELYAQNNGEDLKELASSFINLLTFTAIGAPATFKFFDKNIDRKRYTSTTEILNATLIHQSITGLYETRIDLNKLGGD

SEQ ID NO: 23 - protein, 1377 aa, Streptococcus agalactiae
MNKPYSIGLDIGTNSVGWSIITDDYKVPAKKMRVLGNTDKEYIKKNLIGALLFDGGNTAADRRLKRTARRRYTRRRNRILYLQEIFAEEMSKVDDSFFHRLEDSFLVEEDKRGSKYPIFATMQEEKYYHEKFPTIYHLRKELADKKEKADLRLVYLALAHIIKFRGHFLIEDDRFDVRNTDIQKQYQAFLEIFDTTFENNHLLSQNVDVEAILTDKISKSAKKDRILAQYPNQKSTGIFAEFLKLIVGNQADFKKHFNLEDKTPLQFAKDSYDEDLENLLGQIGDEFADLFSVAKKLYDSVLLSGILTVTDLSTKAPLSASMIQRYDEHHEDLKHLKQFVKASLPENYREVFADSSKDGYAGYIEGKTNQEAFYKYLLKLLTKQEGSEYFLEKIKNEDFLRKQRTFDNGSIPHQVHLTELRAIIRRQSEYYPFLKENQDRIEKILTFRIPYYVGPLAREKSDFAWMTRKTDDSIRPWNFEDLVDKEKSAEAFIHRMTNNDLYLPEEKVLPKHSLIYEKFTVYNELTKVRFLAEGFKDFQFLNRKQKETIFNSLFKEKRKVTEKDIISFLNKVDGYEGIAIKGIEKQFNASLSTYHDLKKILGKDFLDNTDNELILEDIVQTLTLFEDREMIKKCLDIYKDFFTESQLKKLYRRHYTGWGRLSAKLINGIRNKENQKTILDYLIDDGSANRNFMQLINDDDLSFKPIIDKARTGSHSDNLKEVVGELAGSPAIKKGILQSLKIVDELVKVMGYEPEQIVVEMARENQTTAKGLSRSRQRLTTLRESLANLKSNILEEKKPKYVKDQVENHHLSDDRLFLYYLQNGRDMYTKKALDIDNLSQYDIDHIIPQAFIKDDSIDNRVLVSSAKNRGKSDDVPSIEIVKARKMFWKNLLDAKLMSQRKYDNLTKAERGGLTSDDKARFIQRQLVETRQITKHVARILDERFNNEVDNGKKICKVKIVTLKSNLVSNFRKEFGFYKIREVNDYHHAHDAYLNAVVAKAILTKYPQLEPEFVYGMYRQKKLSKIVHEDKEEKYSEATRKMFFYSNLMNMFKRVVRLADGSIVVRPVIETGRYMRKTAWDKKKHFATVRKVLSYPQNNIVKKTEIQTGGFSKESILAHGNSDKLIPRKTKDIYLDPKKYGGFDSPIVAYSVLVVADIKKGKAQKLKTVTELLGITIMERSRFEKNPSAFLESKGYLNIRDDKLMILPKYSLFELENGRRRLLASAGELQKGNELALPTQFMKFLYLASRYNESKGKPEEIEKKQEFVNQHVSYFDDILQLINDFSKRVILADANLEKINKLYQDNKENIPVDELANNIINLFTFTSLGAPAAFKFFDKIVDRKRYTSTKEVLNSTLIHQSITGLYETRIDLGKLGED

SEQ ID NO: 24 - protein, 131 aa, Helicobacter hepaticus
MRILGFDIGITSIGWAYVESNELKDCGVRIFTKAENPKNGDSLAAPRREARGARRRLARRKARLNAIKRLLCKEFELNLNDYLANDGELPKAYQTSKDTKSPYELYTAFHWIIFAFCSIASSLSNRQMLPI

SEQ ID NO: 25 - protein, 1059 aa, Wolinella succinogenes
MIERILGVDLGISSLGWAIVEYDKDDEAANRIIDCGVRLFTAAETPKKKESPNKARREARGIRRVLNRRRVRMNMIKKLFLRAGLIQDVDLDGEGGMFYSKANRADVWELRHDGLYRLLKGDELARVLIHIAKHRGYKFIGDDEADEESGKVKKAGVVLRQNFEAAGCRTVGEWLWRERGANGKKRNKHGDYEISIHRDLLVEEVEAIFVAQQEMRSTIATDALKAAYREIAFFVRPMQRIEKMVGHCTYFPEERRAPKSAPTAEKFIAISKFFSTVIIDNEGWEQKIIERKTLEELLDFAVSREKVEFRHLRKFLDLSDNEIFKGLHYKGKPKTAKKREATLFDPNEPTELEFDKVEAEKKAWISLRGAAKLREALGNEFYGRFVALGKHADEATKILTYYKDEGQKRRELTKLPLEAEMVERLVKIGFSDFLKLSLKAIRDILPAMESGARYDEAVLMLGVPHKEKSAILPPLNKTDIDILNPTVIRAFAQFRKVANALVRKYGAFDRVHFELAREINTKGEIEDIKESQRKNEKERKEAADWIAETSFQVPLTRKNILKKRLYIQQDGRCAYTGDVIELERLFDEGYCEIDHILPRSRSADDSFANKVLCLARANQQKTDRTPYEWFGHDAARWNAFETRTSAPSNRVRTGKGKIDRLLKKNFDENSEMAFKDRNLNDTRYMARAIKTYCEQYWVFKNSHTKAPVQVRSGKLTSVLRYQWGLESKDRESHTHHAVDAIIIAFSTQGMVQKLSEYYRFKETHREKERPKLAVPLANFRDAVEEATRIENTETVKEGVEVKRLLISRPPRARVTGQAHEQTAKPYPRIKQVKNKKKWRLAPIDEEKFESFKADRVASANQKNFYETSTIPRVDVYHKKGKFHLVPIYLHEMVLNELPNLSLGTNPEAMDENFFKFSIFKDDLISIQTQGTPKKPAKIIMGYFKNMHGANMVLSSINNSPCEGFTCTPVSMDKKHKDKCKLCPEENRIAGRCLQGFLDYWSQEGLRPPRKEFECDQGVKFALDVKKYQIDPLGYYYEVKQEKRLGTIPQMRSAKKLVKK

SEQ ID NO: 26 - protein, 1409 aa, Wolinella succinogenes
MLVSPISVDLGGKNTGFFSFTDSLDNSQSGTVIYDESFVLSQVGRRSKRHSKRNNLRNKLVKRLFLLILQEHHGLSIDVLPDEIRGLFNKRGYTYAGFELDEKKKDALESDTLKEFLSEKLQSIDRDSDVEDFLNQIASNAESFKDYKKGFEAVFASATHSPNKKLELKDELKSEYGENAKELLAGLRVTKEILDEFDKQENQGNLPRAKYFEELGEYIATNEKVKSFFDSNSLKLTDMTKLIGNISNYQLKELRRYFNDKEMEKGDIWIPNKLHKITERFVRSWHPKNDADRQRRAELMKDLKSKEIMELLTTTEPVMTIPPYDDMNNRGAVKCQTLRLNEEYLDKHLPNWRDIAKRLNHGKFNDDLADSTVKGYSEDSTLLHRLLDTSKEIDIYELRGKKPNELLVKTLGQSDANRLYGFAQNYYELIRQKVRAGIWVPVKNKDDSLNLEDNSNMLKRCNHNPPHKKNQIHNLVAGILGVKLDEAKFAEFEKELWSAKVGNKKLSAYCKNIEELRKTHGNTFKIDIEELRKKDPAELSKEEKAKLRLTDDVILNEWSQKIANFFDIDDKHRQRFNNLFSMAQLHTVIDTPRSGFSSTCKRCTAENRFRSETAFYNDETGEFHKKATATCQRLPADTQRPFSGKIERYIDKLGYELAKIKAKELEGMEAKEIKVPIILEQNAFEYEESLRKSKTGSNDRVINSKKDRDGKKLAKAKENAEDRLKDKDKRIKAFSSGICPYCGDTIGDDGEIDHILPRSHTLKIYGTVFNPEGNLIYVHQKCNQAKADSIYKLSDIKAGVSAQWIEEQVANIKGYKTFSVLSAEQQKAFRYALFLQNDNEAYKKVVDWLRTDQSARVNGTQKYLAKKIQEKLTKMLPNKHLSFEFILADATEVSELRRQYARQNPLLAKAEKQAPSSHAIDAVMAFVARYQKVFKDGTPPNADEVAKLAMLDSWNPASNEPLTKGLSTNQKIEKMIKSGDYGQKNMREVFGKSIFGENAIGERYKPIVVQEGGYYIGYPATVKKGYELKNCKVVTSKNDIAKLEKIIKNQDLISLKENQYIKIFSINKQTISELSNRYFNMNYKNLVERDKEIVGLLEFIVENCRYYTKKVDVKFAPKYIHETKYPFYDDWRRFDEAWRYLQENQNKTSSKDRFVIDKSSLNEYYQPDKNEYKLDVDTQPIWDDFCRWYFLDRYKTANDKKSIRIKARKTFSLLAESGVQGKVFRAKRKIPTGYAYQALPMDNNVIAGDYANILLEANSKTLSLVPKSGISIEKQLDKKLDVIKKTDVRGLAIDNNSFFNADFDTHGIRLIVENTSVKVGNFPISAIDKSAKRMIFRALFEKEKGKRKKKTTISFKESGPVQDYLKVFLKKIVKIQLRTDGSISNIVVRKNAADFTLSFRSEHIQKLLK

SEQ ID NO: 27 - protein, 1374 aa, Fusobacterium nucleatum
MKKQKFSDYYLGFDIGTNSVGWCVTDLDYNVLRFNKKDMWGSRLFDEAKTAAERRVQRNSRRRLKRRKWRLNLLEEIFSDEIMKIDSNFFRRLKESSLWLEDKNSKEKFTLFNDDNYKDYDFYKQYPTIFHLRDELIKNPEKKDIRLIYLALHSIFKSRGHFLFEGQNLKEIKNFETLYNNLISFLEDNGINKSIDKDNIEKLEKIICDSGKGLKDKEKEFKGIFNSDKQLVAIFKLSVGSSVSLNDLFDTDEYKKEEVEKEKISFREQIYEDDKPIYYSILGEKIELLDIAKSFYDFMVLNNILSDSNYISEAKVKLYEEHKKDLKNLKYIIRKYNKENYDKLFKDKNENNYPAYIGLNKEKDKKEVVEKSRLKIDDLIKVIKGYLPKPERIEEKDKTIFNEILNKIELKTILPKQRISDNGTLPYQIHEVELEKILENQSKYYDFLNYEENGVSTKDKLLKTFKFRIPYYVGPLNSYHKDKGGNSWIVRKEEGKILPWNFEQKVDIEKSAEEFIKRMTNKCTYLNGEDVIPKDSFLYSEYIILNELNKVQVNDEFLNEENKRKIIDELFKENKKVSEKKFKEYLLVNQIANRTVELKGIKDSFNSNYVSYIKFKDIFGEKLNLDIYKEISEKSILWKCLYGDDKKIFEKKIKNEYGDILNKDEIKKINSFKFNTWGRLSEKLLTGIEFINLETGECYSSVMEALRRTNYNLMELLSSKFTLQESIDNENKEMNEVSYRDLIEESYVSPSLKRAILQTLKIYEEIKKITGRVPKKVFIEMARGGDESMKNKKIPARQEQLKKLYDSCGNDIANFSIDIKEMKNSLSSYDNNSLRQKKLYLYYLQFGKCMYTGREIDLDRLLQNNDTYDIDHIYPRSKVIKDDSFDNLVLVLKNENAEKSNEYPVKKEIQEKMKSFWRFLKEKNFISDEKYKRLTGKDDFELRGFMARQLVNVRQTTKEVGKILQQIEPEIKIVYSKAEIASSFREMFDFIKVRELNDTHHAKDAYLNIVAGNVYNTKFTEKPYRYLQEIKENYDVKKIYNYDIKNAWDKENSLEIVKKNMEKNTVNITRFIKEEKGELFNLNPIKKGETSNEIISIKPKLYDGKDNKLNEKYGYYTSLKAAYFIYVEHEKKNKKVKTFERITRIDSTLIKNEKNLIKYLVSQKKLLNPKIIKKIYKEQTLIIDSYPYTFTGVDSNKKVELKNKKQLYLEKKYEQILKNALKFVEDNQGETEENYKFIYLKKRNNNEKNETIDAVKERYNIEFNEMYDKFLEKLSSKDYKNYINNKLYTNFLNSKEKFKKLKLWEKSLILREFLKIFNKNTYGKYEIKDSQTKEKLFSFPEDTGRIRLGQSSLGNNKELLEESVTGLFVKKIKL

SEQ ID NO: 28 - protein, 1084 aa, Corynebacterium diphtheriae
MKYHVGIDVGTFSVGLAAIEVDDAGMPIKTLSLVSHIHDSGLDPDEIKSAVTRLASSGIARRTRRLYRRKRRRLQQLDKFIQRQGWPVIELEDYSDPLYPWKVRAELAASYIADEKERGEKLSVALRHIARHRGWRNPYAKVSSLYLPDGPSDAFKAIREEIKRASGQPVPETATVGQMVTLCELGTLKLRGEGGVLSARLQQSDYAREIQEICRMQEIGQELYRKIIDVVFAAESPKGSASSRVGKDPLQPGKNRALKASDAFQRYRIAALIGNLRVRVDGEKRILSVEEKNLVFDHLVNLTPKKEPEWVTIAEILGIDRGQLIGTATMTDDGERAGARPPTHDTNRSIVNSRIAPLVDWWKTASALEQHAMVKALSNAEVDDFDSPEGAKVQAFFADLDDDVHAKLDSLHLPVGRAAYSEDTLVRLTRRMLSDGVDLYTARLQEFGIEPSWTPPTPRIGEPVGNPAVDRVLKTVSRWLESATKTWGAPERVIIEHVREGFVTEKRAREMDGDMRRRAARNAKLFQEMQEKLNVQGKPSRADLWRYQSVQRQNCQCAYCGSPITFSNSEMDHIVPRAGQGSTNTRENLVAVCHRCNQSKGNTPFAIWAKNTSIEGVSVKEAVERTRHWVTDTGMRSTDFKKFTKAVVERFQRATMDEEIDARSMESVAWMANELRSRVAQHFASHGTTVRVYRGSLTAEARRASGISGKLKFFDGVGKSRLDRRHHAIDAAVIAFTSDYVAETLAVRSNLKQSQAHRQEAPQWREFTGKDAEHRAAWRVWCQKMEKLSALLTEDLRDDRVVVMSNVRLRLGNGSAHKETIGKLSKVKLSSQLSVSDIDKASSEALWCALTREPGFDPKEGLPANPERHIRVNGTHVYAGDNIGLFPVSAGSIALRGGYAELGSSFHHARVYKITSGKKPAFAMLRVYTIDLLPYRNQDLFSVELKPQTMSMRQAEKKLRDALATGNAEYLGWLVVDDELVVDTSKIATDQVKAVEAELGTIRRWRVDGFFSPSKLRLRPLQMSKEGIKKESAPELSKIIDRPGWLPAVNKLFSDGNVTVVRRDSLGRVRLESTAHLPVTWKVQ

SEQ ID NO: 29 - protein, 1395 aa, Treponema denticola
MKKEIKDYFLGLDVGTGSVGWAVTDTDYKLLKANRKDLWGMRCFETAETAEVRRLHRGARRRIERRKKRIKLLQELFSQEIAKTDEGFFQRMKESPFYAEDKTILQENTLFNDKDFADKTYHKAYPTINHLIKAWIENKVKPDPRLLYLACHNIIKKRGHFLFEGDFDSENQFDTSIQALFEYLREDMEVDIDADSQKVKEILKDSSLKNSEKQSRLNKILGLKPSDKQKKAITNLISGNKINFADLYDNPDLKDAEKNSISFSKDDFDALSDDLASILGDSFELLLKAKAVYNCSVLSKVIGDEQYLSFAKVKIYEKHKTDLTKLKNVIKKHFPKDYKKVFGYNKNEKNNNNYSGYVGVCKTKSKKLIINNSVNQEDFYKFLKTILSAKSEIKEVNDILTEIETGTFLPKQISKSNAEIPYQLRKMELEKILSNAEKHFSFLKQKDEKGLSHSEKIIMLLTFKIPYYIGPINDNHKKFFPDRCWVVKKEKSPSGKTTPWNFFDHIDKEKTAEAFITSRTNFCTYLVGESVLPKSSLLYSEYTVLNEINNLQIIIDGKNICDIKLKQKIYEDLFKKYKKITQKQISTFIKHEGICNKTDEVIILGIDKECTSSLKSYIELKNIFGKQVDEISTKNMLEEIIRWATIYDEGEGKTILKTKIKAEYGKYCSDEQIKKILNLKFSGWGRLSRKFLETVTSEMPGFSEPVNIITAMRETQNNLMELLSSEFTFTENIKKINSGFEDAEKQFSYDGLVKPLFLSPSVKKMLWQTLKLVKEISHITQAPPKKIFIEMAKGAELEPARTKTRLKILQDLYNNCKNDADAFSSEIKDLSGKIENEDNLRLRSDKLYLYYTQLGKCMYCGKPIEIGHVFDTSNYDIDHIYPQSKIKDDSISNRVLVCSSCNKNKEDKYPLKSEIQSKQRGFWNFLQRNNFISLEKLNRLTRATPISDDETAKFIARQLVETRQATKVAAKVLEKMFPETKIVYSKAETVSMFRNKFDIVKCREINDFHHAHDAYLNIVVGNVYNTKFTNNPWNFIKEKRDNPKIADTYNYYKVFDYDVKRNNITAWEKGKTIITVKDMLKRNTPIYTRQAACKKGELFNQTIMKKGLGQHPLKKEGPFSNISKYGGYNKVSAAYYTLIEYEEKGNKIRSLETIPLYLVKDIQKDQDVLKSYLTDLLGKKEFKILVPKIKINSLLKINGFPCHITGKTNDSFLLRPAVQFCCSNNEVLYFKKIIRFSEIRSQREKIGKTISPYEDLSFRSYIKENLWKKTKNDEIGEKEFYDLLQKKNLEIYDMLLTKHKDTIYKKRPNSATIDILVKGKEKFKSLIIENQFEVILEILKLFSATRNVSDLQHIGGSKYSGVAKIGNKISSLDNCILIYQSITGIFEKRIDLLKV

SEQ ID NO: 30 - protein, 1334 aa, Listeria monocytogenes
MKNPYTIGLDIGTNSVGWAVLTNQYDLVKRKMKVAGNSDKKQIKKNFWGVRLFDDGQTAVDRRMNRTARRRIERRRNRISYLQEIFAVEMANIDANFFCRLNDSFYVDSEKRNSRHPFFATIEEEVAYHDNYRTIYHLREKLVNSSEKADLRLVYLALAHIIKYRGNFLIEGALDTKNTSVDEVYKQFIETYNQVFMSNIEEGALAKVEENIEVANILAGKFTRREKFERILQLYPGEKSTGMFAQFISLIVGSKGNFQKVFDLIEKTDIECAKDSYEEDLETLLAIIGDEYAELFVAAKNTYNAVVLSSIITVTDTETNAKLSASMIERFDAHEKDLVELKAFIKLNLPKQYEEIFSNAAIDGYAGYIDGKTKQVDFYKYLKTILENIEGSDYFIAKIEEENFLRKQRTFDNGAIPHQLHLEELEAIIHQQAKYYPFLKEDYDKIKSLVTFRIPYFVGPLANGQSEFAWLTRKADGEIRPWNIEEKVDFGKSAVDFIEKMTNKDTYLPKENVLPKHSLCYQKYMVYNELTKIRYIDDQGKTNYFSGREKQQVFNDLFKQKRKVKKKDLELFLRNINHIESPTIEGLEDSFNASYATYHDLLKVGMKQEILDNPLNTEMLEDIVKILTVFEDKPMIKEQLQQFSDVLDGGVLKKLERRHYTGWGRLSAKLLVGIREKQSHLTILDYLMNDDGLNRNLMQLINDSNLSFKSIIEKEQVSTTDKDLQSIVAELAGSPAIKKGILQSLKIVDELVSIMGYPPQTIVVEMARENQTTGKGKNNSKPRYKSLEKAIKEFGSQILKEHPTDNQELKNNRLYLYYLQNGKDMYTGQELDIHNLSNYDIDHIVPQSFITDNSIDNLVLTSSAGNREKGGDVPPLEIVRKRKVFWEKLYQGNLMSKRKFDYLTKAERGGLTEADKARFIHRQLVETRQITKNVANILYQRFNKETDNHGNTMEQVRIVTLKSALVSQFRKQFQLYKVREVNGYHHAHDAYLNGVVANTLLKVYPQLEPEFVYGEYHQFDWFKANKATAKKQFYTNIMLFFAQKERIIDENGEILWDKKYLETIKKVLDYRQMNIVKKTEIQKGEFSKATIKPKGNSSKLIPRKENWDPMKYGGLDSPNMAYAVIIEHAKGKKKIVIEKKLIQINIMERKMFEKDEEAFLEEKGYRHPKVLTKLPKYTLYECEKGRRRMLASANEAQKGNQLVLSNHLVSLLYHAKNCEASDGKSLKYIEAHRETFSELLAQVSEFATRYTLADANLSKINNLFEQNKEGDIKAIAQSFVDLMAFNAMGAPASFKFFEATIDRKRYTNLKELLSSTIIYQSITGLYESRKRLDD

SEQ ID NO: 31 - protein, 1236 aa, Mycoplasma mobile
MYFYKNKENKLNKKVVLGLDLGIASVGWCLTDISQKEDNKFPIILHGVRLFETVDDSDDKLLNETRRKKRGQRRRNRRLFTRKRDFIKYLIDNNIIELEFDKNPKILVRNFIEKYINPFSKNLELKYKSVTNLPIGFHNLRKAAINEKYKLDKSELIVLLYFYLSLRGAFFDNPEDTKSKEMNKNEIEIFDKNESIKNAEFPIDKIIEFYKISGKIRSTINLKFGHQDYLKEIKQVFEKQNIDFMNYEKFAMEEKSFFSRIRNYSEGPGNEKSFSKYGLYANENGNPELIINEKGQKIYTKIFKTLWESKIGKCSYDKKLYRAPKNSFSAKVFDITNKLTDWKHKNEYISERLKRKILLSRFLNKDSKSAVEKILKEENIKFENLSEIAYNKDDNKINLPIINAYHSLTTIFKKHLINFENYLISNENDLSKLMSFYKQQSEKLFVPNEKGSYEINQNNNVLHIFDAISNILNKFSTIQDRIRILEGYFEFSNLKKDVKSSEIYSEIAKLREFSGTSSLSFGAYYKFIPNLISEGSKNYSTISYEEKALQNQKNNFSHSNLFEKTWVEDLIASPTVKRSLRQTMNLLKEIFKYSEKNNLEIEKIVVEVTRSSNNKHERKKIEGINKYRKEKYEELKKVYDLPNENTTLLKKLWLLRQQQGYDAYSLRKIEANDVINKPWNYDIDHIVPRSISFDDSFSNLVIVNKLDNAKKSNDLSAKQFIEKIYGIEKLKEAKENWGNWYLRNANGKAFNDKGKFIKLYTIDNLDEFDNSDFINRNLSDTSYITNALVNHLTFSNSKYKYSVVSVNGKQTSNLRNQIAFVGIKNNKETEREWKRPEGFKSINSNDFLIREEGKNDVKDDVLIKDRSFNGHHAEDAYFITIISQYFRSFKRIERLNVNYRKETRELDDLEKNNIKFKEKASFDNFLLINALDELNEKLNQMRFSRMVITKKNTQLFNETLYSGKYDKGKNTIKKVEKLNLLDNRTDKIKKIEEFFDEDKLKENELTKLHIFNHDKNLYETLKIIWNEVKIEIKNKNLNEKNYFKYFVNKKLQEGKISFNEWVPILDNDFKIIRKIRYIKFSSEEKETDEIIFSQSNFLKIDQRQNFSFHNTLYWVQIWVYKNQKDQYCFISIDARNSKFEKDEIKINYEKLKTQKEKLQIINEEPILKINKGDLFENEEKELFYIVGRDEKPQKLEIKYILGKKIKDQKQIQKPVKKYFPNWKKVNLTYMGEIFKK

SEQ ID NO: 32 - protein, 1372 aa, Legionella pneumophila
MESSQILSPIGIDLGGKFTGVCLSHLEAFAELPNHANTKYSVILIDHNNFQLSQAQRRATRHRVRNKKRNQFVKRVALQLFQHILSRDLNAKEETALCHYLNNRGYTYVDTDLDEYIKDETTINLLKELLPSESEHNFIDWFLQKMQSSEFRKILVSKVEEKKDDKELKNAVKNIKNFITGFEKNSVEGHRHRKVYFENIKSDITKDNQLDSIKKKIPSVCLSNLLGHLSNLQWKNLHRYLAKNPKQFDEQTFGNEFLRMLKNFRHLKGSQESLAVRNLIQQLEQSQDYISILEKTPPEITIPPYEARTNTGMEKDQSLLLNPEKLNNLYPNWRNLIPGIIDAHPFLEKDLEHTKLRDRKRIISPSKQDEKRDSYILQRYLDLNKKIDKFKIKKQLSFLGQGKQLPANLIETQKEMETHFNSSLVSVLIQIASAYNKEREDAAQGIWFDNAFSLCELSNINPPRKQKILPLLVGAILSEDFINNKDKWAKFKIFWNTHKIGRTSLKSKCKEIEEARKNSGNAFKIDYEEALNHPEHSNNKALIKIIQTIPDIIQAIQSHLGHNDSQALIYHNPFSLSQLYTILETKRDGFHKNCVAVTCENYWRSQKTEIDPEISYASRLPADSVRPFDGVLARMMQRLAYEIAMAKWEQIKHIPDNSSLLIPIYLEQNRFEFEESFKKIKGSSSDKTLEQAIEKQNIQWEEKFQRIINASMNICPYKGASIGGQGEIDHIYPRSLSKKHFGVIFNSEVNLIYCSSQGNREKKEEHYLLEHLSPLYLKHQFGTDNVSDIKNFISQNVANIKKYISFHLLTPEQQKAARHALFLDYDDEAFKTITKFLMSQQKARVNGTQKFLGKQIMEFLSTLADSKQLQLEFSIKQITAEEVHDHRELLSKQEPKLVKSRQQSFPSHAIDATLTMSIGLKEFPQFSQELDNSWFINHLMPDEVHLNPVRSKEKYNKPNISSTPLFKDSLYAERFIPVWVKGETFAIGFSEKDLFEIKPSNKEKLFTLLKTYSTKNPGESLQELQAKSKAKWLYFPINKTLALEFLHHYFHKEIVTPDDTTVCHFINSLRYYTKKESITVKILKEPMPVLSVKFESSKKNVLGSFKHTIALPATKDWERLFNHPNFLALKANPAPNPKEFNEFIRKYFLSDNNPNSDIPNNGHNIKPQKHKAVRKVFSLPVIPGNAGTMMRIRRKDNKGQPLYQLQTIDDTPSMGIQINEDRLVKQEVLMDAYKTRNLSTIDGINNSEGQAYATFDNWLTLPVSTFKPEIIKLEMKPHSKTRRYIRITQSLADFIKTIDEALMIKPSDSIDDPLNMPNEIVCKNKLFGNELKPRDGKMKIVSTGKIVTYEFESDSTPQWIQTLYVTQLKKQP

SEQ ID NO: 33 - protein, 1122 aa, Streptococcus thermophilus
MSDLVLGLDIGIGSVGVGILNKVTGEIIHKNSRIFPAAQAENNLVRRTNRQGRRLTRRKKHRIVRLNRLFEESGLITDFTKISINLNPYQLRVKGLTDELSNEELFIALKNMVKHRGISYLDDASDDGNSSVGDYAQIVKENSKQLETKTPGQIQLERYQTYGQLRGDFTVEKDGKKHRLINVFPTSAYRSEALRILQTQQEFNSQITDEFINRYLEILTGKRKYYHGPGNEKSRTDYGRYRTNGETLDNIFGILIGKCTFYPDEFRAAKASYTAQEFNLLNDLNNLTVPTETKKLSKEQKNQIINYVKNEKVMGPAKLFKYIAKLLSCDVADIKGHRIDKSGKAEIHTFEAYRKMKTLETLDIEQMDRETLDKLAYVLTLNTEREGIQEALEHEFADGSFSQKQVDELVQFRKANSSIFGKGWHNFSVKLMMELIPELYETSEEQMTILTRLGKQKTTSSSNKTKYIDEKLLTEEIYNPVVAKSVRQAIKIVNAAIKEYGDFDNIVIEMARETNEDDEKKAIQKIQKANKDEKDAAMLKAANQYNGKAELPHSVFHGHKQLATKIRLWHQQGERCLYTGKTISIHDLINNPNQFEVDHILPLSITFDDSLANKVLVYATANQEKGQRTPYQALDSMDDAWSFRELKAFVRESKTLSNKKKEYLLTEEDISKFDVRKKFIERNLVDTRYASRVVLNALQEHFRAHKIDTKVSVVRGQFTSQLRRHWGIEKTRDTYHHHAVDALIIAASSQLNLWKKQKNTLVSYSEEQLLDIETGELISDDEYKESVFKAPYQHFVDTLKSKEFEDSILFSYQVDSKFNRKISDATIYATRQAKVGKDKKDETYVLGKIKDIYTQDGYDAFMKIYKKDKSKFLMYRHDPQTFEKVIEPILENYPNKEMNEKGKEVPCNPFLKYKEEHGYIRKYSKKGNGPEIKSLKYYDSKLLGNPIDITPENSKNKVVLQSLKPWRTDVYFNKNTGKYEILGLKYADLQFEKKTGTYKISQEKYNGIMKEEGVDSDSEFKFTLYKNDLLLVKDTETKEQQLFRFLSRTMPNVKYYVELKPYSKDKFEKNESLIEILGSADKSGRCIKGLGKSNISIYKVRTDVLGNQHIIKNEGDKPKLDF

SEQ ID NO: 34 - protein, 1128 aa, Streptococcus thermophilus
MSDLVLGLDIGIGSVGVGILNKVTGEIIHKNSRIFPAAQAENNLVRRTNRQGRRLTRRKKHRIVRLNRLFEESGLITDFTKISINLNPYQLRVKGLTDELSNEELFIALKNMVKHRGISYLDDASDDGNSSVGDYAQIVKENSKQLETKTPGQIQLERYQTYGQLRGDFTVEKDGKKHRLINVFPTSAYRSEALRILQTQQEFNPQITDEFINRYLEILTGKRKYYHGPGNEKSRTDYGRYRTSGETLDNIFGILIGKCTFYPEEFRAAKASYTAQEFNLLNDLNNLTVPTETKKLSKEQKNQIINYVKNEKAMGPAKLFKYIAKLLSCDVADIKGYRIDKSGKAEIHTFEAYRKMKTLETLDIEQMDRETLDKLAYVLTLNTEREGIQEALEHEFADGSFSQKQVDELVQFRKANSSIFGKGWHNFSVKLMMELIPELYETSEEQMTILTRLGKQKRLRLQIKQNISNKTKYIDEKLLTEEIYNPVVAKSVRQAIKIVNAAIKEYGDFDNIVIEMARETNEDDEKKAIQKIQKANKDEKDAAMLKAANQYNGKAELPHSVFHGHKQLATKIRLWHQQGERCLYTGKTISIHDLINNPNQFEVDHILPLSITFDDSLANKVLVYATANQEKGQRTPYQALDSMDDAWSFRELKAFVRESKTLSNKKKEYLLTEEDISKFDVRKKFIERNLVDTRYASRVVLNALQEHFRAHKIDTKVSVVRGQFTSQLRRHWGIEKTRDTYHHHAVDALIIAASSQLNLWKKQKNTLVSYSEEQLLDIETGELISDDEYKESVFKAPYQHFVDTLKSKEFEDSILFSYQVDSKFNRKISDATIYATRQAKVGKDKKDETYVLGKIKDIYTQDGYDAFMKIYKKDKSKFLMYRHDPQTFEKVIEPILENYPNKQMNEKGKEVPCNPFLKYKEEHGYIRKYSKKGNGPEIKSLKYYDSKLLGNPIDITPENSKNKVVLQSLKPWRTDVYFNKATGKYEILGLKYADLQFEKGTGTYKISQEKYNDIKKKEGVDSDSEFKFTLYKNDLLLVKDTETKEQQLFRFLSRTLPKQKHYVELKPYDKQKFEGGEALIKVLGNVANGGQCIKGLAKSNISIYKVRTDVLGNQHIIKNEGDKPKLDF

SEQ ID NO: 35 - protein, 1123 aa, Francisella tularensis
MNVKILPIAIDLDVKNTGVFSAFYQKGTSLEKLDNKNGKVYELSKDSYTLLMNNRTARRHKRRGIDRKQLVKRLFKLVWTEQLNLEWDKDTQQAISFLFNRRGFSFITDGYSTEYLNIVPEQVKAILMDIFDDYNGEDDLDSYLKLATEQESKISEIYNKLMQKILEFKLRKLCTDIKDDKVSTKTLKEITSYEFELLADYLANYSESLKTQKFSYTDKQGNLKELSYYHHDKYNIQEFLKRHATINDEILGTLLTDDFDIWNFNFEKFDFDKNEEKLQNQEDKDHTQAHLHHFVFVVNKIKSEMASGGRHRSQYFQEITNVLDENNHQEGYLKNFCENLHNKKYSNLSVKNLVNLVGNLSNLELKPLRKYFNDKIHAKADHWDEQKFTETYCHWILGEWRVGVKDQDKKDGAKYSYKDLCNELKQKVTKAGLIDFLLELDPCRTIPPYLDNNNRKPPKCQSLILNPKFLDNQYPNWQQYLQELKKLQSIQDYLDSFETDLKDLKSSKDQPYFVEYKSSNQQMASGQRDYKDLDARILQFIFDRVKASDELLLNEIYFQAKKLKQKASSELEKLESSKKLDEVIANSQLSQILKSQHTNGIFEQGTFLHLVCKYYKQRQRARDSRLYIMPEYRYDKKLDKYNNTGRFDDNNQLLTYCNHKPRQKRYQLLNDLAGVLQVSRNQLLSSVEEWFQQAQRVGEISKSQDEQIFEWLKSFKIASYCKAAVEMQKQYRGTLKNAIQTAIFRQSENINKNKNTGNQQQALSENSKDVKSLTADEKKLLKLIENIAKASQKIGESLGLNDKQIKKFNSIYSFAQIQQIAFAKRKGNANTCAVCSADNAHRMQQIKITELVEDNKDNIILSAKAQRLPAIPTRIVDGAVKKMATILAKNIVDDNWQNIKQVLSAKHQLHIPIITESNAFEFEPALADVKGKSLKDRRKKALERISPENIFKDKNNRIKEFAKGISAYSGANLTDGDFDGAKEELDHIIPRSHKKYGTLNDEANLICVTRDDNKNIFAIDTSKWFEIETPSDLRDIGVATIQYKIDNNSRPKVRVKLDYVIDDDSKINYFMNHSLLKSRYPDKVLEILKQSTIIEFESSGFNKTIKEMLGMTLAGIYNETSNN

SEQ ID NO: 36 - protein, 1436 aa, Bacteroides fragilis
MKRILGLDLGTNSIGWALVNEAENKDERSSIVKLGVRVNPLTVDELTNFEKGKSITTNADRTLKRGMRRNLQRYKLRRETLTEVLKEHKLITEDTILSENGNRTTFETYRLRAKAVTEEISLEEFARVLLMINKKRGYKSSRKAKGVEEGTLIDGMDIARELYNNNLTPGELCLQLLDAGKKFLPDFYRSDLQNELDRIWEKQKEYYPEILTDVLKEELRGKKRDAVWAICAKYFVWKENYTEWNKEKGKTEQQEREHKLEGIYSKRKRDEAKRENLQWRVNGLKEKLSLEQLVIVFQEMNTQINNSSGYLGAISDRSKELYFNKQTVGQYQMEMLDKNPNASLRNMVFYRQDYLDEFNMLWEKQAVYHKELTEELKKEIRDIIIFYQRRLKSQKGLIGFCEFESRQIEVDIDGKKKIKTVGNRVISRSSPLFQEFKIWQILNNIEVTVVGKKRKRRKLKENYSALFEELNDAEQLELNGSRRLCQEEKELLAQELFIRDKMTKSEVLKLLFDNPQELDLNFKTIDGNKTGYALFQAYSKMIEMSGHEPVDFKKPVEKVVEYIKAVFDLLNWNTDILGFNSNEELDNQPYYKLWHLLYSFEGDNTPTGNGRLIQKMTELYGFEKEYATILANVSFQDDYGSLSAKAIHKILPHLKEGNRYDVACVYAGYRHSESSLTREEIANKVLKDRLMLLPKNSLHNPVVEKILNQMVNVINVIIDIYGKPDEIRVELARELKKNAKEREELTKSIAQTTKAHEEYKTLLQTEFGLTNVSRTDILRYKLYKELESCGYKTLYSNTYISREKLFSKEFDIEHIIPQARLFDDSFSNKTLEARSVNIEKGNKTAYDFVKEKFGESGADNSLEHYLNNIEDLFKSGKISKTKYNKLKMAEQDIPDGFIERDLRNTQYIAKKALSMLNEISHRVVATSGSVTDKLREDWQLIDVMKELNWEKYKALGLVEYFEDRDGRQIGRIKDWTKRNDHRHHAMDALTVAFTKDVFIQYFNNKNASLDPNANEHAIKNKYFQNGRAIAPMPLREFRAEAKKHLENTLISIKAKNKVITGNINKTRKKGGVNKNMQQTPRGQLHLETIYGSGKQYLTKEEKVNASFDMRKIGTVSKSAYRDALLKRLYENDNDPKKAFAGKNSLDKQPIWLDKEQMRKVPEKVKIVTLEAIYTIRKEISPDLKVDKVIDVGVRKILIDRLNEYGNDAKKAFSNLDKNPIWLNKEKGISIKRVTISGISNAQSLHVKKDKDGKPILDENGRNIPVDFVNTGNNHHVAVYYRPVIDKRGQLVVDEAGNPKYELEEVVVSFFEAVTRANLGLPIIDKDYKTTEGWQFLFSMKQNEYFVFPNEKTGFNPKEIDLLDVENYGLISPNLFRVQKFSLKNYVFRHHLETTIKDTSSILRGITWIDFRSSKGLDTIVKVRVNHIGQIVSVGEY

SEQ ID NO: 37 - protein, 1314 aa, Mycoplasma synoviae
MLRLYCANNLVLNNVQNLWKYLLLLIFDKKIIFLFKIKVILIRRYMENNNKEKIVIGFDLGVASVGWSIVNAETKEVIDLGVRLFSEPEKADYRRAKRTTRRLLRRKKFKREKFHKLILKNAEIFGLQSRNEILNVYKDQSSKYRNILKLKINALKEEIKPSELVWILRDYLQNRGYFYKNEKLTDEFVSNSFPSKKLHEHYEKYGFFRGSVKLDNKLDNKKDKAKEKDEEEESDAKKESEELIFSNKQWINEIVKVFENQSYLTESFKEEYLKLFNYVRPFNKGPGSKNSRTAYGVFSTDIDPETNKFKDYSNIWDKTIGKCSLFEEEIRAPKNLPSALIFNLQNEICTIKNEFTEFKNWWLNAEQKSEILKFVFTELFNWKDKKYSDKKFNKNLQDKIKKYLLNFALENFNLNEEILKNRDLENDTVLGLKGVKYYEKSNATADAALEFSSLKPLYVFIKFLKEKKLDLNYLLGLENTEILYFLDSIYLAISYSSDLKERNEWFKKLLKELYPKIKNNNLEIIENVEDIFEITDQEKFESFSKTHSLSREAFNHIIPLLLSNNEGKNYESLKHSNEELKKRTEKAELKAQQNQKYLKDNFLKEALVPLSVKTSVLQAIKIFNQIIKNFGKKYEISQVVIEMARELTKPNLEKLLNNATNSNIKILKEKLDQTEKFDDFTKKKFIDKIENSVVFRNKLFLWFEQDRKDPYTQLDIKINEIEDETEIDHVIPYSKSADDSWFNKLLVKKSTNQLKKNKTVWEYYQNESDPEAKWNKFVAWAKRIYLVQKSDKESKDNSEKNSIFKNKKPNLKFKNITKKLFDPYKDLGFLARNLNDTRYATKVFRDQLNNYSKHHSKDDENKLFKVVCMNGSITSFLRKSMWRKNEEQVYRFNFWKKDRDQFFHHAVDASIIAIFSLLTKTLYNKLRVYESYDVQRREDGVYLINKETGEVKKADKDYWKDQHNFLKIRENAIEIKNVLNNVDFQNQVRYSRKANTKLNTQLFNETLYGVKEFENNFYKLEKVNLFSRKDLRKFILEDLNEESEKNKKNENGSRKRILTEKYIVDEILQILENEEFKDSKSDINALNKYMDSLPSKFSEFFSQDFINKCKKENSLILTFDAIKHNDPKKVIKIKNLKFFREDATLKNKQAVHKDSKNQIKSFYESYKCVGFIWLKNKNDLEESIFVPINSRVIHFGDKDKDIFDFDSYNKEKLLNEINLKRPENKKFNSINEIEFVKFVKPGALLLNFENQQIYYISTLESSSLRAKIKLLNKMDKGKAVSMKKITNPDEYKIIEHVNPLGINLNWTKKLENNN

SEQ ID NO: 38 - protein, 1368 aa, Streptococcus pyogenes
MDKKYSIGLDIGTNSVGWAVITDDYKVPSKKFKVLGNTDRHSIKKNLIGALLFDSGETAEATRLKRTARRRYTRRKNRICYLQEIFSNEMAKVDDSFFHRLEESFLVEEDKKHERHPIFGNIVDEVAYHEKYPTIYHLRKKLVDSTDKADLRLIYLALAHMIKFRGHFLIEGDLNPDNSDVDKLFIQLVQTYNQLFEENPINASGVDAKAILSARLSKSRRLENLIAQLPGEKKNGLFGNLIALSLGLTPNFKSNFDLAEDAKLQLSKDTYDDDLDNLLAQIGDQYADLFLAAKNLSDAILLSDILRLNSEITKAPLSASMIKRYDEHHQDLTLLKALVRQQLPEKYKEIFFDQSKNGYAGYIDGGASQEEFYKFIKPILEKMDGTEELLAKLNREDLLRKQRTFDNGSIPHQIHLGELHAILRRQEDFYPFLKDNREKIEKILTFRIPYYVGPLARGNSRFAWMTRKSEETITPWNFEEVVDKGASAQSFIERMTNFDKNLPNEKVLPKHSLLYEYFTVYNELTKVKYVTEGMRKPAFLSGEQKKAIVDLLFKTNRKVTVKQLKEDYFKKIECFDSVEISGVEDRFNASLGTYHDLLKIIKDKDFLDNEENEDILEDIVLTLTLFEDREMIEERLKTYAHLFDDKVMKQLKRRRYTGWGRLSRKLINGIRDKQSGKTILDFLKSDGFANRNFMQLIHDDSLTFKEDIQKAQVSGQGDSLHEHIANLAGSPAIKKGILQTVKVVDELVKVMGRHKPENIVIEMARENQTTQKGQKNSRERMKRIEEGIKELGSQILKEHPVENTQLQNEKLYLYYLQNGRDMYVDQELDINRLSDYDVDHIVPQSFIKDDSIDNKVLTRSDKNRGKSNNVPSEEVVKKMKNYWRQLLNAKLITQRKFDNLTKAERGGLSELDKAGFIKRQLVETRQITKHVAQILDSRMNTKYDENDKLIREVKVITLKSKLVSDFRKDFQFYKVREINNYHHAHDAYLNAVVGTALIKKYPKLESEFVYGDYKVYDVRKMIAKSEQEIGKATAKYFFYSNIMNFFKTEITLANGEIRKRPLIETNGETGEIVWDKGRDFATVRKVLSMPQVNIVKKTEVQTGGFSKESILPKRNSDKLIARKKDWDPKKYGGFDSPTVAYSVLVVAKVEKGKSKKLKSVKELLGITIMERSSFEKNPIDFLEAKGYKEVRKDLIVKLPKYSLFELENGRKRMLASAGELQKGNELALPSKYVNFLYLASHYEKLKGSPEDNEQKQLFVEQHKHYLDEIIEQISEFSKRVILADANLDKVLSAYNKHRDKPIREQAENIIHLFTLTNLGAPAAFKYFDTTIDRKRYTSTKEVLDATFIHQSITGLYETRIDLSQLGGD

SEQ ID NO: 39 - protein, 1368 aa, Streptococcus pyogenes
MDKKYSIGLDIGTNSVGWAVITDDYKVPSKKFKVLGNTDRHSIKKNLIGALLFDSGETAEATRLKRTARRRYTRRKNRICYLQEIFSNEMAKVDDSFFHRLEESFLVEEDKKHERHPIFGNIVDEVAYHEKYPTIYHLRKKLVDSTDKADLRLIYLALAHMIKFRGHFLIEGDLNPDNSDVDKLFIQLVQTYNQLFEENPINASGVDAKAILSARLSKSRRLENLIAQLPGEKKNGLFGNLIALSLGLTPNFKSNFDLAEDAKLQLSKDTYDDDLDNLLAQIGDQYADLFLAAKNLSDAILLSDILRVNTEITKAPLSASMIKRYDEHHQDLTLLKALVRQQLPEKYKEIFFDQSKNGYAGYIDGGASQEEFYKFIKPILEKMDGTEELLVKLNREDLLRKQRTFDNGSIPHQIHLGELHAILRRQEDFYPFLKDNREKIEKILTFRIPYYVGPLARGNSRFAWMTRKSEETITPWNFEEVVDKGASAQSFIERMTNFDKNLPNEKVLPKHSLLYEYFTVYNELTKVKYVTEGMRKPAFLSGEQKKAIVDLLFKTNRKVTVKQLKEDYFKKIECFDSVEISGVEDRFNASLGTYHDLLKIIKDKDFLDNEENEDILEDIVLTLTLFEDREMIEERLKTYAHLFDDKVMKQLKRRRYTGWGRLSRKLINGIRDKQSGKTILDFLKSDGFANRNFMQLIHDDSLTFKEDIQKAQVSGQGDSLHEHIANLAGSPAIKKGILQTVKVVDELVKVMGRHKPENIVIEMARENQTTQKGQKNSRERMKRIEEGIKELGSQILKEHPVENTQLQNEKLYLYYLQNGRDMYVDQELDINRLSDYDVDHIVPQSFLKDDSIDNKVLTRSDKNRGKSDNVPSEEVVKKMKNYWRQLLNAKLITQRKFDNLTKAERGGLSELDKAGFIKRQLVETRQITKHVAQILDSRMNTKYDENDKLIREVKVITLKSKLVSDFRKDFQFYKVREINNYHHAHDAYLNAVVGTALIKKYPKLESEFVYGDYKVYDVRKMIAKSEQEIGKATAKYFFYSNIMNFFKTEITLANGEIRKRPLIETNGETGEIVWDKGRDFATVRKVLSMPQVNIVKKTEVQTGGFSKESILPKRNSDKLIARKKDWDPKKYGGFDSPTVAYSVLVVAKVEKGKSKKLKSVKELLGITIMERSSFEKNPIDFLEAKGYKEVKKDLIIKLPKYSLFELENGRKRMLASAGELQKGNELALPSKYVNFLYLASHYEKLKGSPEDNEQKQLFVEQHKHYLDEIIEQISEFSKRVILADANLDKVLSAYNKHRDKPIREQAENIIHLFTLTNLGAPAAFKYFDTTIDRKRYTSTKEVLDATLIHQSITGLYETRIDLSQLGGD

SEQ ID NO: 40 - protein, 1370 aa, Streptococcus agalactiae; identical to SEQ ID NO: 21

SEQ ID NO: 41 - protein, 1173 aa, Rhodospirillum rubrum
MRPIEPWILGLDIGTDSLGWAVFSCEEKGPPTAKELLGGGVRLFDSGRDAKDHTSRQAERGAFRRARRQTRTWPWRRDRLIALFQAAGLTPPAAETRQIALALRREAVSRPLAPDALWAALLHLAHHRGFRSNRIDKRERAAAKALAKAKPAKATAKATAPAKEADDEAGFWEGAEAALRQRMAASGAPTVGALLADDLDRGQPVRMRYNQSDRDGVVAPTRALIAEELAEIVARQSSAYPGLDWPAVTRLVLDQRPLRSKGAGPCAFLPGEDRALRALPTVQDFIIRQTLANLRLPSTSADEPRPLTDEEHAKALALLSTARFVEWPALRRALGLKRGVKFTAETERNGAKQAARGTAGNLTEAILAPLIPGWSGWDLDRKDRVFSDLWAARQDRSALLALIGDPRGPTRVTEDETAEAVADAIQIVLPTGRASLSAKAARAIAQAMAPGIGYDEAVTLALGLHHSHRPRQERLARLPYYAAALPDVGLDGDPVGPPPAEDDGAAAEAYYGRIGNISVHIALNETRKIVNALLHRHGPILRLVMVETTRELKAGADERKRMIAEQAERERENAEIDVELRKSDRWMANARERRQRVRLARRQNNLCPYTSTPIGHADLLGDAYDIDHVIPLARGGRDSLDNMVLCQSDANKTKGDKTPWEAFHDKPGWIAQRDDFLARLDPQTAKALAWRFADDAGERVARKSAEDEDQGFLPRQLTDTGYIARVALRYLSLVTNEPNAVVATNGRLTGLLRLAWDITPGPAPRDLLPTPRDALRDDTAARRFLDGLTPPPLAKAVEGAVQARLAALGRSRVADAGLADALGLTLASLGGGGKNRADHRHHFIDAAMIAVTTRGLINQINQASGAGRILDLRKWPRTNFEPPYPTFRAEVMKQWDHIHPSIRPAHRDGGSLHAATVFGVRNRPDARVLVQRKPVEKLFLDANAKPLPADKIAEIIDGFASPRMAKRFKALLARYQAAHPEVPPALAALAVARDPAFGPRGMTANTVIAGRSDGDGEDAGLITPFRANPKAAVRTMGNAVYEVWEIQVKGRPRWTHRVLTRFDRTQPAPPPPPENARLVMRLRRGDLVYWPLESGDRLFLVKKMAVDGRLALWPARLATGKATALYAQLSCPNINLNGDQGYCVQSAEGIRKEKIRTTSCTALGRLRLSKKAT

SEQ ID NO: 42 - protein, 997 aa, Maritimibacter alkaliphilus
MKVLVDAGLMPSDPAAAKALETLDPYELRATGLDVMLPLTHLGRAVFHLNQRRGFKSNRKTDRGDNESGKIKDATKRLTWAMQEAGARTYGEFLHMRRARASDPRQVPSVRTRLSVASRGGPDSKEEAGYDFYPERAHLEDEFHALWSAQAAFHPDLTCELRDVVFEKIFYQRPLKEPKVGLCLFTAEERLPKAHPLTGRRVLYETVNQLRVTADGRTTRPLTLEERDMIVYALDNKKPVKSLSSMHLKLVALGKLVKLKDGERFTLESGVRDAIACDPIRATMGHPDGFGPAWSRLDWQAQWALIEKLRQVQSDDDFASLVAWLGATHNLSEDHAKRVANLHLPEGYGRLGLTATEAILCNLKAEVCTYSQAVERWGKHHSNQRTGECLEALPYYGEVLDRHVIPGTYNEDDDDVTRYGRITNPTVHIGLNQLRRLVNRIIATYGKPDQIVVELARELKQSEAQKSEALKKIRDTTADAIRRGRQLEEIGQKNTGANRLLLRLWEDLGPAVGPRCCPYTGKPISVTMLFDGACDVDHILPYSRTLDDSFANRTICLREANRQKGDRTPWEAWGGSDQWDAIEANLKDLPENKRKRFAPDAMERFEGERDFLDRALVDTQYLARISRAYLDTLFTEGGHVWVVPGRMTEMLRRHWGLNALLSDKDRGAGKVKNRTDHRHHAIDAAVIAATDHSLVNRISKAAGQGESAGQSAELIARDTPEPWEGFRNDISAQIARIVVSHRADHGRIDVEGRKHGKDSTAGRLHNDTAYGIVDDHTVVSRTPLLSLKPGDIEVTTKGKNIRDTQLQKALSVATTGKDGKGFEEALRNFAEKEGPYQGIRRVRLIETLQSSARVEVGSDEDGQPLKAYKGDSNHCYDLWKLPDGKVVPHVVSTYEAHAGTDKRPHPAAKRILRVFKKDMVAIEQDDQTAIFYVQKLDRANGLFLAPHLEANADARHRNPNDAFKFLQMGAGSVVRNKLRRVYVDEIGRIKDPGPPKH

SEQ ID NO: 43 - protein, 1027 aa, Blastopirellula marina
MFSESGDQPSLVDCGVRIFPEGVERDQQGGEKSKSQSRRVARGIRRQVRRRAQRLRHLKHALITTGLFPADVVDQQEVLASNPYELRSRALSEKLEPYEIGRILLHLAKRRGFLSNRTTDRSGGNELKGILAEMTQLQGEIAAHGCQTLGQYLHQLGDDGETFAQRLRGRHTLRAMYEDEFEKIWERQASYYPALLTEELRGGEEGKQSYPLVPTARRKSESLLKRFGLHGLLFFQRKMYWPKSVIGRCDLEPKEKRCPKADRLAQRFRILQEVNNLRLISPADRKEYTFAEFVGAGADKKLVDYLCEAKERTFPQIRKKFKLPETISFNYERGERSKLQGHETDAHFNGKKGLGKRRWSEIAEDVKDHIIQIVLEEDREDVALRKLTQDCSLTVEEAHKAMALHLPAGYSQYSRVAISRLLPHLELGKLLMGNDASDSAMHAAGYLRPDEREVRQYDLLPEPPDIPNPLVRQALYEVRKVINAIIREYGALGTIRVELAREAKKSAEQRTQIRIANAKRERENAAIAKTLQEMSPAIRPTRRNIQRYLLWKDQGGVCIYTGKVISQAQLFDSGEVDVDHILPRWRSLDDSMANKVIAHRSANNEKGDRTPWEWLGHDKPRFDELLLRAQRLPYGKRQRFIQKEVELTNFVERQLRDTTYVSRLVVQYLKGLGVPITTVKGPMTAELRHHWGLNALLNEDGSQKKNRSDHRHHAIDAIVIGLTDAKRLHALANARGKDLQPPWSEFRSDVATALGRMAVSHRVRRRIQGALHEETIYGPTQKAAQPTSTDQRPWAKDWIEDSQIVVRRKSVSDLTNTKHLAKIRDVTIRKILEDHLRRQKVDPTKPGVIPKDAFAGSNAPQMPSGVPIKKVRLVERGETWRKIGSGEASKFIKPGSNHHISYFAISRKGRESWKAHVTIMLDAACIAKESINNGKIVNRSIGDQGRFLMSLSIGEMFEITNNGGEILLCVVRKIDQSGRIYYKIHDDARESMDLKKDNLYMSPSKMQQFDARKVTVTPLGKIRNAND

SEQ ID NO: 44 - protein, 158 aa, Francisella tularensis
MIDFLLELDPCITIPPYLDNNNRKPPKCQSLILNPKFLDNQYPNWQQYLQELKKLQSIQDYLDSFETDLKDLKSSKDQPYFVEYKSSNQQMASGQRDYKDLDARILQFIFDRVKASDELLLSEIYFQAKKLKQKASSELEKLESSKKLDEVIANSQLS

SEQ ID NO: 45 - protein, 393 aa, Francisella tularensis
MNVKILPIAIDLDVKNTGVFSAFYQKGTSLEKLDNKNGKVYELSKDSYTLLMNNRTAQRHQRRGIDRKQLVKRLFKLVWTEQLNLEWDKDTQQAISFLFNRRGFSFITDGYSTEYLNIVPEQVKAILMDIFDDYNGEDDLDSYLKLATEQESKISEIYNKLMQKILEFKLRKLCTDIKDDKVSTKTLKEITSYEFELLADYLANYSESLKTQKFSYTDKQGNLKELSYYHHDKYNIQEFLKRHATINDEILDTLLTDDFDIWNFNFEKFDFDKNEEKLQSQEDKDHTQAYFHHFVFAVNKIKSEMASGGRHRSQYFQEITNVLDENNHQEGYLKNFCENLHNKKYSNLSVKNLVNLVGNLSNLELKPLRKYFNDKNLIIGMSKSLQKLIATGY

SEQ ID NO: 46 - protein, 1066 aa, Rhodopseudomonas palustris
MSERVVRRILGIDLGIASCGWGVVDISGAGGGIIATGVRCFDAPLIDKTGEPKSATRRTARGQRRIVRRRRQRMNGVRRLLCEFGLLPDPRPDALNQAMRRISTASAAAQVTPWTLRAAAHQRLLSNEELAVVLGHIARHRGFRSNAKNEAGANAADETSKMKKAMEATREGLAKYHAFGDMIANDPKFANRKRNRDKDYSHTAKRSDLEDEVRAILRAQLRFGSAAATETLAQTFADVAFFQRPLQDSEDRVGDCPFEPGQKRAARRAPSFELFRFLSRLANLKLAVGRSPERRLTAEEIALAAKGFGETKKTITFKSLREALDLDPNARFSGIGKDKEASLDVVARTGGAAYGTKTLKDALGDAPWRSLSRTPETLDRIAEILSFREDITSIRNGLEDLGLDSLVVEALMQAAANGDFKEFTRAGHISARAARNIIPGLREGLVYSEACARVGYDHAARLSVPLDQVGSPVTRKALSEALKQVRAVAREYGPIDYFHIELARSVGKSAEERKQLTDGIEARNVEKAKRRKQAEEHLGRAPSDDELLRYELAKEQNFKCIYSGDAIDPAGVAANDTRYQVDHILPWSRFGDDSYLNKTLCTARSNQNKRGRTPFEWFEADKTDVEWMEYVARVENLQEVKGRKKRNYSIKDAAAIEDKFKARNLTDTQWATRLLADELSRMFPPRECERAICGRADGGNDGLTIVEERRVFTRPGAITSKLRRAWGLEGLKKQDGKRVEDDRHHAVDALVLAATTESLLQRLTVEVQRREREGRPDDIFHCAEPWRGFRADVRRTVYGSETMPGIFVSRAERRRARGKAHDATIKQIREIEGERLVFERKPVEKLTDKDLEKIPIPKPYGQVSDPKRLRDELVESLRAWIAAGKPKDRPPLSPKGDVIRKVRIQTNDKVSVEINGGTVDRGDMARVDVFRKKNKKAVWEYYVVPIYPHQIVALNDPPDRAVIAYAEDKDWKEIDSSYEFLWSLFGLSYVEISKANGECIDGYFRGLHRGTGAASVCKHISLGKDATVSGIGLKTLASFKKFTIDRLGRKFEIPREVRTWRGEACT

SEQ ID NO: 47 - protein, 1149 aa, Lactobacillus salivarius
MERYHIGLDIGTSSIGWAVIGDDFKIKRKKGKNLIGVRLFKEGDTAAERRGFRTQRRRLNRRKWRLKLLEEIFDPYMAEVDKYFFARLKESNLSPKDSNKKYLGSLLFPDISDSNFYDKYPTIYHLRRDLMEKDKKFDLREIYLAIHHIVKYRGNFLEKVPAKNYKNSGASIGFLLEEVNDLYGNIIGNEDVAILDNDKFEDVEKIILNDEIRNIDKQKNVGRLLVKDKKEKNIVTAFSKAIFGYKFNLEDLLLIESDEKNKLTFNDENIDDIFNELSHSLNDNQMDLLTKTREIYFKFKLNMIVPTGYTISESMIEKYEMHKAHLKMYKEFINTLNAKDRKILKNAYSDYINNEKAKAANAQENFYKTVKKTIKENDSDTAKKIIGLIDEGNFMPKQRTGENGVIPHQLHQIELDRIIENQAKYYPWLAEENPVEKNRKFAKYKLDELVTFRVPYYVGPLIDKTESNKNEKETKFAWMVRKAKGTITPWNFENLVDRTESANRFIKRMTSKDTYIIGEDVLPASSLLYEKYKVLNELNNIKVNKKKLDVEQKQHVYLDLFTTRKNVTKDDLATSLNCDVESITGLTDNKKFNSSLSSYIDLKAILGNIVDDYSKNEDLEKIIEYSTIFEDGNIYKEKLSEISWLTDEQIEKLSNIHFKGWGRLSKKLLTQITNENGERIIDTLWNTSNNFIQVISDESIQAKLAEINGEYANKYNLEDILDEAYTSPQNKKAIRQVMKVVEDIEKAMKCEPTSIAIEFTREKRKSKLTNTRYKKISETYEKITDELISEYELGKLQSELDSKVNNMRDRYYLYFMQLGRDMYTGEKMNIDELHQKYDIDHILPQSFIKDDSLNNRVLTSKSVNIKEKSDKTAADLYAAKMGDFWRKLRKQGLMTEQKYKNLLTRTDSINKYTKQSFIKRQLVETSQVVKLAANILQDKYRNTKIIEIRARLNSDLRKKYELIKNREVNDYHHAIDGYLTTFVGQYLYKVYPKLRSYFVYDDFKKLDSNYLKHMDKFNFIWKLEDKKAEDVYDKVNDEFVLNVPEMKEYIRKIYNYKYMLVSKEVTTKNGAFYDQTKYNAKTINLIPIKKDKPTNIYGGYKGKVSSYMMLVKIQKKKEVIYKFVGVPRLWTDELDRLIDTDEKKALLKK

SEQ ID NO: 48 - protein, 1064 aa, Rhodopseudomonas palustris
MSECVTRRILGIDLGIASCGWGVIEVGEASGSIIASGVRCFDAPLIDKTGEPKSATRRTARGQRRIIRRRRQRMNAVRRLLAEFGVLTGRSPDALHQALLRLSQSVAGSQVTPWTLRAAAHERKLTNDELAVVLGHIARHRGFRSNSKNDGGANAADETSKMKKAMETTREGLARYHSFGAMIASDPKFADRKRNRDKDYSHTAKRSDLEDEVRTIFRSQTRFGSLVASEKLSQAFADAAFFQRPLQDSEDMVGSCPFEPGQKRTARRAPSFELFRFLSRLANLKLTVGRAPERRLTPDEIALAAKGFGETKKSITFKSLREALDLDPNARFSGVAKEKESTLDVAARTGGAAYGTKTLKDALGDAPWRSLSRMPEKLDRIAEILSFREDMKAIRNGLEEVGLDGLVVDALMQATANGDFKDFTRAAHISALAARNIIPGLREGLVYSDACTRVGYDHAARPAVPLSQIGSPVTRKALSEALKQVRAVAREYGPIDYFHIELARSIGKSAEERKKLTDGIEARNVEKEKRRKEAAEHLGRAPSDDELLRYELAKEQNFKCIYSGDPIDPAGISANDTRYQVDHILPWSRFGDDSYVNKTLCTARSNQNKRGRTPFEWFDADKTEAEWMEYSARVEDLKEVKGRKKRNYSIKDAASVEDKFKARNLTDTQWATRLLADELKRMFPPRECERVVTVRADGGNDGLSIVEERRVFTRPGAITSKLRRAWGLEGLKKQDGKRVEDDRHHAVDALVLAATTESLLNRLTVEVQQREREGRQDDIFHCSQPWPGFRVDVQRTVYGSETMPGIFVSRAERRRARGKAHDATVKQIRDIDGERIVFERKPIEKLTDKDLERIPVPEPYGKAADPKKLRDELVENLRAWIAAGKPKDKPPRSPKGDIIRKVRIETKDKVAVEINGGTVDRGDMARVDVFRKKNKKGVWEFYVIPIYPHQIVASALPPNRAVIAYKAESEWTAIDGCFEFAWSLNPMSYLELVKSNGELIEGYFRSMDRTTGAINLSPMSTNSETIRSIGVKTLSSFRKFTVDRLGRKFEIPREVRTWRGEACT

SEQ ID NO: 49 - protein, 1166 aa, Nitrobacter hamburgensis
MHVEIDFPHFSRGDSHLAMNKNEILRGSSVLYRLGLDLGSNSLGWFVTHLEKRGDRHEPVALGPGGVRIFPDGRDPQSGTSNAVDRRMARGARKRRDRFVERRKELIAALIKYNLLPDDARERRALEVLDPYALRKTALTDTLPAHHVGRALFHLNQRRGFQSNRKTDSKQSEDGAIKQAASRLATDKGNETLGVFFADMHLRKSYEDRQTAIRAELVRLGKDHLTGNARKKIWAKVRKRLFGDEVLPRADAPHGVRARATITGTKASYDYYPTRDMLRDEFNAIWAGQSAHHATITDEARTEIEHIIFYQRPLKPAIVGKCTLDPATRPFKEDPEGYRAPWSHPLAQRFRILSEARNLEIRDTGKGSRRLTKEQSDLVVAALLANREVKFDKLRTLLKLPAEARFNLESDRRAALDGDQTAARLSDKKGFNKAWRGFPPERQIAIVARLEETEDENELIAWLEKECALDGAAAARVANTTLPDGHCRLGLRAIKKIVPIMQDGLDEDGVAGAGYHIAAKRAGYDHAKLPTGEQLGRLPYYGQWLQDAVVGSGDARDQKEKQYGQFPNPTVHIGLGQLRRVVNDLIDKYGPPTEISIEFTRALKLSEQQKAERQREQRRNQDKNKARAEELAKFGRPANPRNLLKMRLWEELAHDPLDRKCVYTGEQISIERLLSDEVDIDHILPVAMTLDDSPANKIICMRYANRHKRKQTPSEAFGSSPTLQGHRYNWDDIAARATGLPRNKRWRFDANAREEFDKRGGFLARQLNETGWLARLAKQYLGAVTDPNQIWVVPGRLTSMLRGKWGLNGLLPSDNYAGVQDKAEEFLASTDDMEFSGVKNRADHRHHAIDGLVTALTDRSLLWKMANAYDEEHEKFVIEPPWPTMRDDLKAALEKMVVSHKPDHGIEGKLHEDSAYGFVKPLDATGLKEEEAGNLVYRKAIESLNENEVDRIRDIQLRTIVRDHVNVEKTKGVALADALRQLQAPSDDYPQFKHGLRHVRILKKEKGDYLVPIANRASGVAYKAYSAGENFCVEVFETAGGKWDGEAVRRFDANKKNAGPKIAHAPQWRDANEGAKLVMRIHKGDLIRLDHEGRARIMVVHRLDAAAGRFKLADHNETGNLDKRHATNNDIDPFRWLMASYNTLKKLAAVPVRVDELGRVWRVMPN

SEQ ID NO: 50 - protein, 641 aa, Nitrobacter hamburgensis
MHKRNSRSYRLGLDLGSNSLGWFVTHLEKRGDRYEPVALDPGGVRIFPDGRDPQSGMSNAVDRRMARGARKRRDRFVDPYALRKAALTNALPAHRVGRAIFHLNQRRGFQSNRKTDRKQSEDGAIKQAASKLKARMHEEAAPTLGAFFADMHLRKSYDDQQTAIRAELVRLGKDHLTGNARKKVWAKVRKRLFGDEVLRPKDTSDGARARATTTGTKASYDFYPTRAMLLDEFNAIWAAQREHHLAMTDEAKAEIEHIIFYHRPLKPAIVGKCTLDPATRPFKEDPEGYRAPWSHPLAQRFRILSEARNLEIRETGKTSRRLTKDQSDLVVAALLANREVKFDKLRTLLKLPAEARFNLESDRRSTATRPPHGCRTRRASIRRGAGFLRNGRSRSSPDWKKPKTKTNCSHGSKWNAHLTAQRPRASPIRRCRTAIAGSACAQSKRSCRSCRTSSMRMALRAPAITSWPSVPATTIPVDTFQQGGNAFGRILSVVTIELFAITDRVDPVQEQDARCFALRIAECRSDGLQHFAEVSLGLPPRNAAQDQRHSAGLCQSSCVGRFVPGTPCRRTPRSTSLHGKEPSAHAFGSTARSRPQLPASPRPCMSFRDGTSSSPARMPETLDRCAISRSNRSSVCRAERL

SEQ ID NO: 51 - protein, 1368 aa, Streptococcus pyogenes
MDKKYSIGLDIGTNSVGWAVITDDYKVPSKKFKVLGNTDRHSIKKNLIGALLFDSGEIAEATRLKRTARRRYTRRKNRICYLQEIFSNEMAKVDDSFFHRLEESFLVEEDKKHERHPIFGNIVDEVAYHEKYPTIYHLRKKLVDSTDKADLRLIYLALAHMIKFRGHFLIEGDLNPDNSDVDKLFIQLVQTYNQLFEENPINASGVDAKAILSARLSKSRRLENLIAQLPGEKKNGLFGNLIALSLGLTPNFKSNFDLAEDAKLQLSKDTYDDDLDNLLAQIGDQYADLFLAAKNLSDAILLSDILRLNSEITKAPLSASMIKRYDEHHQDLTLLKALVRQQLPEKYKEIFFDQSKNGYAGYIDGGASQEEFYKFIKPILEKMDGTEELLAKLNREDLLRKQRTFDNGSIPHQIHLGELHAILRRQEDFYPFLKDNREKIEKILTFRIPYYVGPLARGNSRFAWMTRKSEETITPWNFEEVVDKGASAQSFIERMTNFDKNLPNEKVLPKHSLLYEYFTVYNELTKVKYVTEGMRKPAFLSGEQKKAIVDLLFKTNRKVTVKQLKEDYFKKIECFDSVEISGVEDRFNASLGTYHDLLKIIKDKDFLDNEENEDILEDIVLTLTLFEDREMIEERLKTYAHLFDDKVMKQLKRRRYTVWGRLSRKLINGIRDKQSGKTILDFLKSDGFANRNFMQLIHDDSLTFKEDIQKAQVSGQGDSLHEHIANLAGSPAIKKGILQTVKVVDELVKVMGRHKPENIVIEMARENQTTQKGQKNSRERMKRIEEGIKELGSQILKEHPVENTQLQNEKLYLYYLQNGRDMYVDQELDINRLSDYDVDHIVPQSFIKDDSIDNKVLTRSDKNRGKSDNVPSEEVVKKMKNYWRQLLNAKLITQRKFDNLTKAERGGLSELDKAGFIKRQLVETRQITKHVAQILDSRMNTKYDENDKLIREVKVITLKSKLVSDFRKDFQFYKVREINNYHHAHDAYLNAVVGTALIKKYPKLESEFVYGDYKVYDVRKMLAKSEQEIGKATAKYFFYSNIMNFFKTEITLANGEIRKRPLIETNGETGEIVWDKGRDFATVRKVLSMPQVNIVKKTEVQTGGFSKESILPKRNSDKLIARKKDWDPKKYGGFDSPTVAYSVLVVAKVEKGKSKKLKSVKELLGITIMERSSFEKNPIDFLEAKGYKEVRKDLIIKLPKYSLFELENGRKRMLASAGELQKGNELALPSKYVNFLYLASHYEKLKGSPEDNEQKQLFVEQHKHYLDEIIEQISEFSKRVILADANLDKVLSAYNKHRDKPIREQAENIIHLFTLTNLGAPTAFKYFDTTIDRKRYTSTKEVLDATFIHQSITGLYETRIDLSQLGGD

SEQ ID NO: 52 - protein, 1368 aa, Streptococcus pyogenes
MDKKYSIGLDIGTNSVGWAVITDDYKVPSKKFKVLGNTDRHSIKKNLIGALLFDSGETAEATRLKRTARRRYTRRKNRICYLQEIFSNEMAKVDDSFFHRLEESFLVEEDKKHERHPIFGNIVDEVAYHEKYPTIYHLRKKLVDSTDKADLRLIYLALAHMIKFRGHFLIEGDLNPDNSDVDKLFIQLVQTYNQLFEENPINASGVDAKAILSARLSKSRRLENLIAQLPGEKKNGLFGNLIALSLGLTPNFKSNFDLAEDAKLQLSKDTYDDDLDNLLAQIGDQYADLFLAAKNLSDAILLSDILRLNSEITKAPLSASMIKRYDEHHQDLTLLKALVRQQLPEKYKEIFFDQSKNGYAGYIDGGASQEEFYKFIKPILEKMDGTEELLAKLNREDLLRKQRTFDNGSIPHQIHLGELHAILRRQEDFYPFLKDNREKIEKILTFRIPYYVGPLARGNSRFAWMTRKSEETITPWNFEEVVDKGASAQSFIERMTNFDKNLPNEKVLPKHSLLYEYFTVYNELTKVKYVTEGMRKPAFLSGEQKKAIVDLLFKTNRKVTVKQLKEDYFKKIECFDSVEISGVEDRFNASLGTYHDLLKIIKDKDFLDNEENEDILEDIVLTLTLFEDREMIEERLKTYAHLFDDKVMKQLKRRRYTGWGRLSRKLINGIRDKQSGKTILDFLKSDGFANRNFMQLIHDDSLTFKEDIQKAQVSGQGDSLHEHIANLAGSPAIKKGILQTVKVVDELVKVMGRHKPENIVIEMARENQTTQKGQKNSRERMKRIEEGIKELGSQILKEHPVENTQLQNEKLYLYYLQNGRDMYVDQELDINRLSDYDVDHIVPQSFIKDDSIDNKVLTRSDKNRGKSDNVPSEEVVKKMKNYWRQLLNAKLITQRKFDNLTKAERGGLSELDKAGFIKRQLVETRQITKHVAQILDSRMNTKYDENDKLIREVKVITLKSKLVSDFRKDFQFYKVREINNYHHAHDAYLNAVVGTALIKKYPKLESEFVYGDYKVYDVRKMIAKSEQEIGKATAKYFFYSNIMNFFKTEITLANGEIRKRPLIETNGETGEIVWDKGRDFATVRKVLSMPQVNIVKKTEVQTGGFSKESILPKRNSDKLIARKKDWDPKKYGGFDSPTVAYSVLVVAKVEKGKSKKLKSVKELLGLTIMERSSFEKNPIDFLEAKGYKEVKKDLIIKLPKYSLFELENGRKRMLASAGELQKGNELALPSKYVNFLYLASHYEKLKGSPEDNEQKQLFVEQHKHYLDEIIEQISEFSKRVILADANLDKVLSAYNKHRDKPIREQAENIIHLFTLTNLGAPAAFKYFDTTIDRKRYTSTKEVLDATLIHQSITGLYETRIDLSQLGGD

SEQ ID NO: 53 - protein, 1368 aa, Streptococcus pyogenes
MDKKYSIGLDIGTNSVGWAVITDDYKVPSKKFKVLGNTDRHSIKKNLIGALLFDSGEIAEATRLKRTARRRYTRRKNRICYLQEIFSNEMAKVDDSFFHRLEESFLVEEDKKHERHPIFGNIVDEVAYHEKYPTIYHLRKKLVDSTDKADLRLIYLALAHMIKFRGHFLIEGDLNPDNSDVDKLFIQLVQTYNQLFEENPINASGVDAKAILSARLSKSRRLENLIAQLPGEKKNGLFGNLIALSLGLTPNFKSNFDLAEDAKLQLSKDTYDDDLDNLLAQIGDQYADLFLAAKNLSDAILLSDILRLNSEITKAPLSASMIKRYDEHHQDLTLLKALVRQQLPEKYKEIFFDQSKNGYAGYIDGGASQEEFYKFIKPILEKMDGTEELLAKLNREDLLRKQRTFDNGSIPHQIHLGELHAILRRQEDFYPFLKDNREKIEKILTFRIPYYVGPLARGNSRFAWMTRKSEETITPWNFEEVVDKGASAQSFIERMTNFDKNLPNEKVLPKHSLLYEYFTVYNELTKVKYVTEGMRKPAFLSGEQKKAIVDLLFKTNRKVTVKQLKEDYFKKIECFDSVEISGVEDRFNASLGTYHDLLKIIKDKDFLDNEENEDILEDIVLTLTLFEDREMIEERLKTYAHLFDDKVMKQLKRRRYTGWGRLSRKLINGIRDKQSGKTILDFLKSDGFANRNFMQLIHDDSLTFKEDIQKAQVSGQGDSLHEHIANLAGSPAIKKGILQTVKVVDELVKVMGRHKPENIVIEMARENQTTQKGQKNSRERMKRIEEGIKELGSQILKEHPVENTQLQNEKLYLYYLQNGRDMYVDQELDINRLSDYDVDHIVPQSFIKDDSIDNKVLTRSDKNRGKSDNVPSEEVVKKMKNYWRQLLNAKLITQRKFDNLTKAERGGLSELDKAGFIKRQLVETRQITKHVAQILDSRMNTKYDENDKLIREVKVITLKSKLVSDFRKDFQFYKVREINNYHHAHDAYLNAVVGTALIKKYPKLESEFVYGDYKVYDVRKMLAKSEQEIGKATAKYFFYSNIMNFFKTEITLANGEIRKRPLIETNGETGEIVWDKGRDFATVRKVLSMPQVNIVKKTEVQTGGFSKESILPKRNSDKLIARKKDWDPKKYGGFDSPTVAYSVLVVAKVEKGKSKKLKSVKELLGITIMERSSFEKNPIDFLEAKGYKEVRKDLIIKLPKYSLFELENGRKRMLASAGELQKGNELALPSKYVNFLYLASHYEKLKGSPEDNEQKQLFVEQHKHYLDEIIEQISEFSKRVILADANLDKVLSAYNKHRDKPIREQAENIIHLFTLTNLGAPTAFKYFDTTIDRKRYTSTKEVLDATFIHQSITGLYETRIDLSQLGGD

SEQ ID NO: 54 - protein, 1371 aa, Streptococcus pyogenes
MDKKYSIGLDIGTNSVGWAVITDDYKVPSKKFKVLGNTDRHSIKKNLIGALLFDSGETAEATRLKRTARRRYTRRKNRICYLQEIFSNEMAKVDDSFFHRLEESFLVEEDKKHERHPIFGNIVDEVAYHEKYPTIYHLRKKLADSTDKADLRLIYLALAHMIKFRGHFLIEGDLNPDNSDVDKLFIQLVQTYNQLFEENPINASRVDAKAILSARLSKSRRLENLIAQLPGEKKNGLFGNLIALSLGLTPNFKSNFDLAEDAKLQLSKDTYDDDLDNLLAQIGDQYADLFLAAKNLSDATLLSDILRVNSEITKAPLSASMIKRYDEHHQDLTLLKALVRQQLPEKYKEIFFDQSKNGYAGYIDGGASQEEFYKFIKPILEKMDGTEELLAKLNREDLLRKQRTFDNGSIPHQIHLGELHAILRRQEDFYPFLKDNREKIEKILTFRIPYYVGPLARGNSRFAWMTRKSEETITPWNFEEVVDKGASAQSFIERMTNFDKNLPNEKVLPKHSLLYEYFTVYNELTKVKYVTEGMRKPAFLSGEQKKAIVDLLFKTNRKVTVKQLKEDYFKKIECFDSVEISGVEDRFNASLGTYHDLLKIIKDKDFLDNEENEDILEDIVLTLTLFEDKEMIEERLKTYAHLFDDKVMKQLKRRHYTGWGRLSRKLINGIRDKQSGKTILDFLKSDGFANRNFIQLIHDDSLTFKEAIQKAQVSGQGHSLHEQIANLAGSPAIKKGILQSVKVVDELVKVMGHKPENIVIEMARENQTTQKGQKNSRERMKRIEEGIKELGSQILKEHPVENTQLQNEKLYLYYLQNGRDMYVDQELDINRLSDYDVDHIVPQSFIKDDSIDNKVLTRSDKNRGKSDDVPSEEVVKKMKNYWRQLLNAKLITQRKFDNLTKAERGGLSELDKAGFIKRQLVETRQITKHVAQILDSRMNTKYDENDKLIREVKVITLKSKLVSDFRKDFQFYKVREINNYHHAHDAYLNAVVGTALIKKYPKLESEFVYGDYKVYDVRKMIAKSEQEIGKATAKRFFYSNIMNFFKTEITLANGEIRKRPLIETNEETGEIVWDKGRDFATVRKVLSMPQVNIVKKTEVQTGALTNESIYARGSFDKLISRKHRFESSKYGGFGSPTVTYSVLVVAKSKVQDGKVKKIKTGKELIGITLLDKLVFEKNPLKFIEDKGYGNVQIDKCIKLPKYSLFEFENGTRRMLASVMANNNSRGDLQKANEMFLPAKLVTLLYHAHKIESSKELEHEAYILDHYNDLYQLLSYIERFASLYVDVEKNISKVKELFSNIESYSISEICSSVINLLTLTASGAPADFKFLGTTIPRKRYGSPQSILSSTLIHQSITGLYETRIDLSQLGSD

SEQ ID NO: 55 - protein, 1121 aa, Streptococcus thermophilus
MSDLVLGLDIGIGSVGVGILNKVTGEIIHKNSRIFPAAQAENNLVRRTNRQGRRLARRKKHRRVRLNRLFEESGLITDFTKISINLNPYQLRVKGLTDELSNEELFIALKNMVKHRGISYLDDASDDGNSSVGDYAQIVKENSKQLETKTPGQIQLERYQTYGQLRGDFTVEKDGKKHRLINVFPTSAYRSEALRILQTQQEFNPQITDEFINRYLEILTGKRKYYHGPGNEKSRTDYGRYRTSGETLDNIFGILIGKCTFYPDEFRAAKASYTAQEFNLLNDLNNLTVPTETKKLSKEQKNQIINYVKNEKAMGPAKLFKYIAKLLSCDVADIKGYRIDKSGKAEIHTFEAYRKMKTLETLDIEQMDRETLDKLAYVLTLNTEREGIQEALEHEFADGSFSQKQVDELVQFRKANSSIFGKGWHNFSVKLMMELIPELYETSEEQMTILTRLGKQKTTSSSNKTKYIDEKLLTEEIYNPVVAKSVRQAIKIVNAAIKEYGDFDNIVIEMARETNEDDEKKAIQKIQKANKDEKDAAMLKAANQYNGKAELPHSVFHGHKQLATKIRLWHQQGERCLYTGKTISIHDLINNSNQFEVDHILPLSITFDDSLANKVLVYATANQEKGQRTPYQALDSMDDAWSFRELKAFVRESKTLSNKKKEYLLTEEDISKFDVRKKFIERNLVDTRYASRVVLNALQEHFRAHKIDTKVSVVRGQFTSQLRRHWGIEKTRDTYHHHAVDALIIAASSQLNLWKKQKNTLVSYSEDQLLDIETGELISDDEYKESVFKAPYQHFVDTLKSKEFEDSILFSYQVDSKFNRKISDATIYATRQAKVGKDKADETYVLGKIKDIYTQDGYDAFMKIYKKDKSKFLMYRHDPQTFEKVIEPILENYPNKQINEKGKEVPCNPFLKYKEEHGYIRKYSKKGNGPEIKSLKYYDSKLGNHIDITPKDSNNKVVLQSVSPWRADVYFNKTTGKYEILGLKYADLQFEKGTGTYKISQEKYNDIKKKEGVDSDSEFKFTLYKNDLLLVKDTETKEQQLFRFLSRTMPKQKHYVELKPYDKQKFEGGEALIKVLGNVANSGQCKKGLGKSNISIYKVRTDVLGNQHIIKNEGDKPKLDF

SEQ ID NO: 56 - protein, 1388 aa, Streptococcus thermophilus
MTKPYSIGLDIGTNSVGWAVTTDNYKVPSKKMKVLGNTSKKYIKKNLLGVLLFDSGITAEGRRLKRTARRRYTRRRNRILYLQEIFSTEMATLDDAFFQRLDDSFLVPDDKRDSKYPIFGNLVEEKAYHDEFPTIYHLRKYLADSTKKADLRLVYLALAHMIKYRGHFLIEGEFNSKNNDIQKNFQDFLDTYNAIFESDLSLENSKQLEEIVKDKISKLEKKDRILKLFPGEKNSGIFSEFLKLIVGNQADFRKCFNLDEKASLHFSKESYDEDLETLLGYIGDDYSDVFLKAKKLYDAILLSGFLTVTDNETEAPLSSAMIKRYNEHKEDLALLKEYIRNISLKTYNEVFKDDTKNGYAGYIDGKTNQEDFYVYLKKLLAEFEGADYFLEKIDREDFLRKQRTFDNGSIPYQIHLQEMRAILDKQAKFYPFLAKNKERIEKILTFRIPYYVGPLARGNSDFAWSIRKRNEKITPWNFEDVIDKESSAEAFINRMTSFDLYLPEEKVLPKHSLLYETFNVYNELTKVRFIAESMRDYQFLDSKQKKDIVRLYFKDKRKVTDKDIIEYLHAIYGYDGIELKGIEKQFNSSLSTYHDLLNIINDKEFLDDSSNEAIIEEIIHTLTIFEDREMIKQRLSKFENIFDKSVLKKLSRRHYTGWGKLSAKLINGIRDEKSGNTILDYLIDDGISNRNFMQLIHDDALSFKKKIQKAQIIGDEDKGNIKEVVKSLPGSPAIKKGILQSIKIVDELVKVMGGRKPESIVVEMARENQYTNQGKSNSQQRLKRLEKSLKELGSKILKENIPAKLSKIDNNALQNDRLYLYYLQNGKDMYTGDDLDIDRLSNYDIDHIIPQAFLKDNSIDNKVLVSSASNRGKSDDVPSLEVVKKRKTFWYQLLKSKLISQRKFDNLTKAERGGLSPEDKAGFIQRQLVETRQITKHVARLLDEKFNNKKDENNRAVRTVKIITLKSTLVSQFRKDFELYKVREINDFHHAHDAYLNAVVASALLKKYPKLEPEFVYGDYPKYNSFRERKSATEKVYFYSNIMNIFKKSISLADGRVIERPLIEVNEETGESVWNKESDLATVRRVLSYPQVNVVKKVEEQNHGLDRGKPKGLFNANLSSKPKPNSNENLVGAKEYLDPKKYGGYAGISNSFTVLVKGTIEKGAKKKITNVLEFQGISILDRINYRKDKLNFLLEKGYKDIELIIELPKYSLFELSDGSRRMLASILSTNNKRGEIHKGNQIFLSQKFVKLLYHAKRISNTINENHRKYVENHKKEFEELFYYILEFNENYVGAKKNGKLLNSAFQSWQNHSIDELCSSFIGPTGSERKGLFELTSRGSAADFEFLGVKIPRYRDYTPSSLLKDATLIHQSVTGLYETRIDLAKLGEG

SEQ ID NO: 57 - protein, 1138 aa, Acidothermus cellulolyticus
MGGSEVGTVPVTWRLGVDVGERSIGLAAVSYEEDKPKEILAAVSWIHDGGVGDERSGASRLALRGMARRARRLRRFRRARLRDLDMLLSELGWTPLPDKNVSPVDAWLARKRLAEEYVVDETERRRLLGYAVSHMARHRGWRNPWTTIKDLKNLPQPSDSWERTRESLEARYSVSLEPGTVGQWAGYLLQRAPGIRLNPTQQSAGRRAELSNATAFETRLRQEDVLWELRCIADVQGLPEDVVSNVIDAVFCQKRPSVPAERIGRDPLDPSQLRASRACLEFQEYRIVAAVANLRIRDGSGSRPLSLEERNAVIEALLAQTERSLTWSDIALEILKLPNESDLTSVPEEDGPSSLAYSQFAPFDETSARIAEFIAKNRRKIPTFAQWWQEQDRTSRSDLVAALADNSIAGEEEQELLVHLPDAELEALEGLALPSGRVAYSRLTLSGLTRVMRDDGVDVHNARKTCFGVDDNWRPPLPALHEATGHPVVDRNLAILRKFLSSATMRWGPPQSIVVELARGASESRERQAEEEAARRAHRKANDRIRAELRASGLSDPSPADLVRARLLELYDCHCMYCGAPISWENSELDHIVPRTDGGSNRHENLAITCGACNKEKGRRPFASWAETSNRVQLRDVIDRVQKLKYSGNMYWTRDEFSRYKKSVVARLKRRTSDPEVIQSIESTGYAAVALRDRLLSYGEKNGVAQVAVFRGGVTAEARRWLDISIERLFSRVAIFAQSTSTKRLDRRHHAVDAVVLTTLTPGVAKTLADARSRRVSAEFWRRPSDVNRHSTEEPQSPAYRQWKESCSGLGDLLISTAARDSIAVAAPLRLRPTGALHEETLRAFSEHTVGAAWKGAELRRIVEPEVYAAFLALTDPGGRFLKVSPSEDVLPADENRHIVLSDRVLGPRDRVKLFPDDRGSIRVRGGAAYIASFHHARVFRWGSSHSPSFALLRVSLADLAVAGLLRDGVDVFTAELPPWTPAWRYASIALVKAVESGDAKQVGWLVPGDELDFGPEGVTTAAGDLSMFLKYFPERHWVVTGFEDDKRINLKPAFLSAEQAEVLRTERSDRPDTLTEAGEILAQFFPRCWRATVAKVLCHPGLTVIRRTALGQPRWRRGHLPYSWRPWSADPWSGGTP

SEQ ID NO: 58 - protein, 1629 aa, Francisella novicida
MNFKILPIAIDLGVKNTGVFSAFYQKGTSLERLDNKNGKVYELSKDSYTLLMNNRTARRHQRRGIDRKQLVKRLFKLIWTEQLNLEWDKDTQQAISFLFNRRGFSFITDGYSPEYLNIVPEQVKAILMDIFDDYNGEDDLDSYLKLATEQESKISEIYNKLMQKILEFKLMKLCTDIKDDKVSTKTLKEITSYEFELLADYLANYSESLKTQKFSYTDKQGNLKELSYYHHDKYNIQEFLKRHATINDRILDTLLTDDLDIWNFNFEKFDFDKNEEKLQNQEDKDHIQAHLHHFVFAVNKIKSEMASGGRHRSQYFQEITNVLDENNHQEGYLKNFCENLHNKKYSNLSVKNLVNLIGNLSNLELKPLRKYFNDKIHAKADHWDEQKFTETYCHWILGEWRVGVKDQDKKDGAKYSYKDLCNELKQKVTKAGLVDFLLELDPCRTIPPYLDNNNRKPPKCQSLILNPKFLDNQYPNWQQYLQELKKLQSIQNYLDSFETDLKVLKSSKDQPYFVEYKSSNQQIASGQRDYKDLDARILQFIFDRVKASDELLLNEIYFQAKKLKQKASSELEKLESSKKLDEVIANSQLSQILKSQHTNGIFEQGTFLHLVCKYYKQRQRARDSRLYIMPEYRYDKKLHKYNNTGRFDDDNQLLTYCNHKPRQKRYQLLNDLAGVLQVSPNFLKDKIGSDDDLFISKWLVEHIRGFKKACEDSLKIQKDNRGLLNHKINIARNTKGKCEKEIFNLICKIEGSEDKKGNYKHGLAYELGVLLFGEPNEASKPEFDRKIKKFNSIYSFAQIQQIAFAERKGNANTCAVCSADNAHRMQQIKITEPVEDNKDKIILSAKAQRLPAIPTRIVDGAVKKMATILAKNIVDDNWQNIKQVLSAKHQLHIPIITESNAFEFEPALADVKGKSLKDRRKKALERISPENIFKDKNNRIKEFAKGISAYSGANLTDGDFDGAKEELDHIIPRSHKKYGTLNDEANLICVTRGDNKNKGNRIFCLRDLADNYKLKQFETTDDLEIEKKIADTIWDANKKDFKFGNYRSFINLTPQEQKAFRHALFLADENPIKQAVIRAINNRNRTFVNGTQRYFAEVLANNIYLRAKKENLNTDKISFDYFGIPTIGNGRGIAEIRQLYEKVDSDIQAYAKGDKPQASYSHLIDAMLAFCIAADEHRNDGSIGLEIDKNYSLYPLDKNTGEVFTKDIFSQIKITDNEFSDKKLVRKKAIEGFNTHRQMTRDGIYAENYLPILIHKELNEVRKGYTWKNSEEIKIFKGKKYDIQQLNNLVYCLKFVDKPISIDIQISTLEELRNILTTNNIAATAEYYYINLKTQKLHEYYIENYNTALGYKKYSKEMEFLRSLAYRSERVKIKSIDDVKQVLDKDSNFIIGKITLPFKKEWQRLYREWQNTTIKDDYEFLKSFFNVKSITKLHKKVRKDFSLPISTNEGKFLVKRKTWDNNFIYQILNDSDSRADGTKPFIPAFDISKNEIVEAIIDSFTSKNIFWLPKNIELQKVDNKNIFAIDTSKWFEVETPSDLRDIGIATIQYKIDNNSRPKVRVKLDYVIDDDSKINYFMNHSLLKSRYPDKVLEILKQSTIIEFESSGFNKTIKEMLGMKLAGIYNETSNN

SEQ ID NO: 59 - protein, 1068 aa, Verminephrobacter eiseniae
MNKAVAYRLALDLGSTSLGWAIFRLNEAREPTAIIRAGVRIFSDGRNANSEPLAVHRRVARAMRRRRDRLLKRKKRMHDQLVQHGFFPAEVAERKELERLNPYQLRAKGLHEALTPGEFARALFHINQRRGFKSNRKTDRKDNDSGALKQAISELRKRIQDSDCATAGEWFWKERMQQKPEGVRGQWVRARYRKTPSTTDEGKKRIGYDLYVDRAMVEQEFDALWAAQAALQPGLFTEAARAELKDTLLYQRDLRPVKPGRCTLLPAEERAPLALPSTQRFRILQEVNNLRLLDEALREVPLNLAQRDAVVSALEGKKELSFAAIRKLLTLSGKFNLEDEKRAELKGNATSVILARKDLFGDAWAGFDAAVQDEIVWRLVSQESEGALIAWLQQHTGVDGVCAEAIVNTRLPDGYGRLSRKALERIVPALQREVCTYDKAVQAAGFAHHSDLGFDFDYAEDEVQQVGEHTIASTGEVQAQYAFKQLPYYGKALQRHVAFGSGDAKDHEEKCYGKIANPTVHIGLNQVRTVVNALIRRYGHPTEVVVELARDLKQSREQKQQTQREQADNQKRNEDIRKRIAPILETSPERVRDRDIKKWILWEELNKKDIADRHCPYSGERISATMLLSEAVEIEHILPFSRTLDDSLNNRTVAMRRANRIKGDRTPWEARADFEAQGWRYEAILQRAEGMPPRKRYRFAEDGYQRWLGKDRNFLARALNDTSYLSRLAANYLRLVCPQGVRVIPGQMTDKLRGKFGLNSVLGLDGKKNRNDHRHHAVDACVIGVTDQGLMQRFANASKQARENGLTRLVQDMLLPWWPSYYDHVERAVRHIRVSHRPDHGFEGAMMKGTAHGIREDGIREDGRIKQRPKAKGSADHKTITLIPIDEPRQLARHGVDAEGKPLPYKGYASGSNYCIEITKNGKGKWEGQVISTFDAYRIKAAADAAARAGQVISTVEADSIVRKSGWERLRGAQSQNGQPLVMRLVIGDSVRMEVDGRDEVMRVVKMSGKEMVFAPVREANVDKRNNMPDEQDPFTYTYKRADQLRKAKARQVTISPIGELRDPGFKG

SEQ ID NO: 60 - protein, 1125 aa, Francisella tularensis
MNVKILPIAIDLDVKNTGVFSAFYQKGTSLEKLDNKNGKVYELSKDSYTLLMNNRTARRHQRRGIDRKQLVKRLFKLVWTEQLNLEWDKDTQQAISFLFNRRGFSFITDGYSTEYLNIVPEQVKAILMDIFDDYNGEDDLDSYLKLATEQESKISEIYNKLMQKILEFKLRKLCTDIKDDKVSTKTLKEITSYEFELLADYLANYSESLKIQKFSYTDKQGNLKELSYYHHDKYNIQEFLKRHATINDEILDTLLTDDFDIWNFNFEKFDFDKNEEKLQNQEDKDHTQAHLHHFVFAVNKIKSEMASGGRHRSQYFQEITNVLDENNHQEGYLKNFCENLHNKKYSNLSVKNLVNLVGNLSNLELKPLRKYFNDKIHAKADHWDEQKFTETYCHWILGEWRVGVKDQDKKDGAKYSYKDLCNELKQKVTKAGLIDFLLELDPCRTIPPYLDNNNRKPPKCQSLILNPKFLDNQYPNWQQYLQELKKLQSIQDYLDSFETDLKDLKSSKDQPYFVEYKSSNQQMASGQRDYKDLDARILQFIFDRVKASDELLLNEIYFQAKKLKQKASSELEKLESSKKLDEVIANSQLSQILKSQHTNGIFEQGTFLHLVCKYYKQRQRARDSRLYIMPEYRYDKKLDKYNNTGRFDDNNQLLTYCNHKPRQKRYQLLNDLAGVLQVSRNQLLSSVEEWFQQAQRVGEISKSQDEQIFEWLKSFKIASYCKAAVEMQKQYRGTLKNAIQTAIFRQSENINKNKNKNTGNQQQALSENSKDVKSLTADEKKLLKLIENIAKASQKIGESLGLNDKQIKKFNSIYSFAQIQQIAFAERKGNANTCAVCSADNAHRMQQIKITELVEDNKDNIILSAKAQRLPAIPTRIVDGAVKKMATILAKNIVDDNWQNIKQVLSAKHQLHIPIITESNAFEFEPALADVKGKSLKDRRKKALERISPENIFKDKNNRIKEFAKGISAYSGANLTDGDFDGAKEELDHIIPRSHKKYGTLNDEANLICVTRDDNKNIFAIDTSKWFEIETPSDLRDIGVATIQYKIDNNSRPKVRVKLDYVIDDDSKINYFMNHSLLKSRYPDKVLEILKQSTIIEFESSGFNKTIKEMLGMTLAGIYNETSNN

SEQ ID NO: 61 - protein, 1064 aa, Bradyrhizobium sp.
MKRTSLRAYRLGVDLGANSLGWFVVWLDDHGQPEGLGPGGVRIFPDGRNPQSKQSNAAGRRLARSARRRRDRYLQRRGKLMGLLVKHGLMPADEPARKRLECLDPYGLRAKALDEVLPLHHVGRALFHLNQRRGLFANRAIEQGDKDASAIKAAAGRLQTSMQACGARTLGEFLNRRHQLRATVRARSPVGGDVQARYEFYPTRAMVDAEFEAIWAAQAPHHPTMTAEAHDTIREAIFSQRAMKRPSIGKCSLDPATSQDDVDGFRCAWSHPLAQRFRIWQDVRNLAVVETGPTSSRLGKEDQDKVARALLQTDQLSFDEIRGLLGLPSDARFNLESDRRDHLKGDATGAILSARRHFGPAWHDRSLDRQIDIVALLESALDEAAIIASLGTTHSLDEAAAQRALSALLPDGYCRLGLRAIKRVLPLMEAGRTYAEAASAAGYDHALLPGGKLSPTGYLPYYGQWLQNDVVGSDDERDTNERRWGRLPNPTVHIGIGQLRRVVNELIRWHGPPAEITVELTRDLKLSPRRLAELEREQAENQRKNDKRTSLLRKLGLPASTHNLLKLRLWDEQGDVASECPYTGEAIGLERLVSDDVDIDHLIPFSISWDDSAANKVVCMRYANREKGNRTPFEAFGHRQGRPYDWADIAERAARLPRGKRWRFGPGARAQFEELGDFQARLLNETSWLARVAKQYLAAVTHPHRIHVLPGRLTALLRATWELNDLLPGSDDRAAKSRKDHRHHAIDALVAALTDQALLRRMANAHDDTRRKIEVLLPWPTFRIDLETRLKAMLVSHKPDHGLQARLHEDTAYGTVEHPETEDGANLVYRKTFVDISEKEIDRIRDRRLRDLVRAHVAGERQQGKTLKAAVLSFAQRRDIAGHPNGIRHVRLTKSIKPDYLVPIRDKAGRIYKSYNAGENAFVDILQAESGRWIARATTVFQANQANESHDAPAAQPIMRVFKGDMLRIDHAGAEKFVKIVRLSPSNNLLYLVEHHQAGVFQTRHDDPEDSFRWLFASFDKLREWNAELVRIDTLGQPWRRKRGLETGSEDATRIGWTRPKKWP

SEQ ID NO: 62 - protein, 1354 aa, Flavobacterium psychrophilum
MKKILGLDLGTNSIGWAFINEAENEIEVSSIVNTGVRIVPLTTDEESDFKKGNTISINADRTLKRGARRGLQRFKQRREALLETFNRIKFIATDFVYAETGAATTFSSYQLRAKSAVEAVTKEELVKVLLMLNKKRGYKSSRKAKTAEEGDAIDGMKIAKEIFENNLTPGQWVYNSLSKGGKFIPDFYHSDLQKELEKIVRFQNQFHSEQINDKLLADIQGKSRTQTSQHFSKTLNIPLAENKGTREETKLQHYQWRNEALANELDMKILAFIITEINNQINQSSGYLGAISDRSKELYFNQETVGQYQYKQLQENVHAKLKNQVFYRQDYLDEFEKIWETQAKFHSELNEKLKAEIRDITIFYQRKLKSQKHLVSFCEFEKGHKAIPKSSPLFQEFRIWQNLNNVVVKNETTKEVFELSEELKQLIAEELQFKESMTDVQMLTFCELKKGTHTVNFKKIEGNRTNTSIYKAFEKILEVEGYEIDFSKMKPLEIKETVAPIFETLNINTVILDFDPTIQGNDFDKQPYYQLWHLLYSAEDDDKLKETLKTKFGFKENHLPFILNINLQADYGSLSAKAIKKILPHLMDGHIYDKACLMVGYNHSSSLTTAQNNDRVLKDTLELLKKNSLRNPVVEKILNQMINVINAIMKDPAMGKPDEIRVELARELKANNEQRKKATSDINTATTEHERIRKLLHSEFNIPRVTRNDIIRYKLWLETGGISLYTGNPIKASDLFSKNYDIEHIIPKSRLFDDSFSNKTLCERQLNIDKSNKTAYSFLQEKLSENDFAAYENRVKDLFKTGKIKSYTKYKKLLMADNEIPEGFIDRQLRETQYIAKKAKEILLEVSRNVTATIGSVTDKLRQDWELVDVMKELNWEKYDKLGLTHIEEGKNGERLSKIKDWTKRNDHRHHAMDAITVAFTKPAYIQYLNNLNAKTQGENKANSIIGIENKHLYRDKNNKLRFISPMKNFREEAKKQLESILISYKAKNKVVTKNKNTTKKSGGTNQKIQLTPRGRLHKETVYGKLQQYATKEEKVNASFTEDYIQKVAKKEYREALLKRLEENDNDPKKAFTGKNALNKTPIYISLKDNIIVPEKVKTVWLETDYTIRKDITPDLKIDKVIDVGIKRILQNRLNEFNGDPKKAFVNLGESPIWLNKEKGIAIKRVTISGVSNAQALHTKKDHLGNEILDKNGNPIPVDFISTGNNHHVAIYRDEKGNLQEEVVSFYDAVIRRNLGLSVINKNHEKGWEFLFSMKQNEFFIFPSDGFNPHEIDLLNPNNYHLISPNIFRVQKISTKNYMFNHHLETKAVDGEMLKSKKELSKTSYHFIQTPTNLNGIIKVRINHLGKIVHLGEY

SEQ ID NO: 63 - protein, 1062 aa, Actinobacillus succinogenes
MNLNYILGLDLGIASVGWAVVEIDEQENPQRLIDVGVRTFDRAEVLKTGESLALARRLARSSRRLVKRRAERIKKAKRLLKAENLLLSADEILPNEAWQLRVKGLDQKLERQEWAAVLLHLLKHRGYLSQRKNESKSENKELGALLSGVAINHQILQSAEYRTPAEIAVNKFQAEEGHIRNQRGAYTHTFSRLDLLAEMELLFQRQATLGNPHTSTKLLENLTALLMWQKPALAGEAILKMLGKCTFEPTEYKAAKNSYSAERFVWLTKLNNLRILEQGAERALTDNERFALLDQPYEKAKLTYAQVRTLLGLSDEAIFKGLRYQGEDKKAVETKTTLMEVKAYHQIRKALEGLDLKAEWNELKNNPALLDEIGTAFSLYKTDDDIHRYLDGKLSESVLNALLENLNFDKFIQLSLKALQQILPLMLQGQRYDEAVSAIYGDHYGKKSDEIDRLLPNIPTDEIRNPVVLRTLTQARKVINAVVRLYGSPARIHIETGREVGKSYQDRKKLEKQQEENRKQRENAVKKFKEYFPNFVGEPKGKDILKMRLYELQQAKCLYSGKSLELYRLLEKGYVEVDHALPFSRTWDDSFNNKVLVLANENQNKGNATPYEWLDGKNNSEGWQHFVARVQTSGFSYAKKQRVLIQELDEKSFIERNLNDTRYVARFLCNHIADNMLLTGKGKRKVFASNGQITALLRGCWGLQKVRENNDRHHALDAVVVACSTKSMQDKITKFVKYKEGRLFKDKKDGVYKGERINRETGEIISLHFPTPWKFFKENVEIRIFSENPKLELENRLPDYPQYNHEFVQPLFVSRMPTRKMTGQGHMETVKSAKRLDKGLSVLKVPLTQLKLSDLERMVNREREMALYEALKECLEQFGNDPAKAFAEPFYKKGGALVKAVRVEQTQKSGVLVRNGNGVADNATGSIVRVDVFTKGGKYFLVPIYTWQVAKGILPNKAVIQGKDESEWEEMDENAVFQFSMHKNDLIKVKTKKGEIFGYFNGLDRATGSIEIEEHDLEKSKGKNGSHRGLGVKTAFFLEKYQVDELGKNIRPCRPTKRQHVR

SEQ ID NO: 64 - protein, 1340 aa, Dorea longicatena
MEQEYYLGLDMGTGSVGWAVTDSEYHVLRKHGKALWGVRLFESASTAEERRMFRTSRRRLDRRNWRIEILQEIFAEEISKKDPGFFLRMKESKYYPEDKRDINGNCPELPYALFVDDDFTDKDYHKKFPTIYHLRKMLMNTEETPDIRLVYLAIHHMMKHRGHFLLSGDINEIKEFGTTFSKLLENIKNEELDWNLELGKEEYAVVESILKDNMLNRSTKKTRLIKALKAKSICEKAVLNLLAGGTVKLSDIFGLEELNETERPKISFADNGYDDYIGEVENELGEQFYIIETAKAVYDWAVLVEILGKYTSISEAKVATYEKHKSDLQFLKKIVRKYLTKEEYKDIFVSTSDKLKNYSAYIGMTKINGKKVDLQSKRCSKEEFYDFIKKNVLKKLEGQPEYEYLKEELERETFLPKQVNRDNGVIPYQIHLYELKKILGNLRDKIDLIKENEDKLVQLFEFRIPYYVGPLNKIDDGKEGKFTWAVRKSNEKIYPWNFENVVDIEASAEKFIRRMTNKCTYLMGEDVLPKDSLLYSKYMVLNELNNVKLDGEKLSVELKQRLYTDVFCKYRKVTVKKIKNYLKCEGIISGNVEITGIDGDFKASLTAYHDFKEILTGTELAKKDKENIITNIVLFGDDKKLLKKRLNRLYPQITPNQLKKICALSYTGWGRFSKKFLEEITAPDPETGEVWNIITALWESNNNLMQLLSNEYRFMEEVETYNMGKQTKTLSYETVENMYVSPSVKRQIWQTLKIVKELEKVMKESPKRVFIEMAREKQESKRTESRKKQLIDLYKACKNEEKDWVKELGDQEEQKLRSDKLYLYYTQKGRCMYSGEVIELKDLWDNTKYDIDHIYPQSKTMDDSLNNRVLVKKKYNATKSDKYPLNENIRHERKGFWKSLLDGGFISKEKYERLIRNTELSPEELAGFIERQIVETRQSTKAVAEILKQVFPESEIVYVKAGTVSRFRKDFELLKVREVNDLHHAKDAYLNIVVGNSYYVKFTKNASWFIKENPGRTYNLKKMFTSGWNIERNGEVAWEVGKKGTIVTVKQIMNKNNILVTRQVHEAKGGLFDQQIMKKGKGQIAIKETDERLASIEKYGGYNKAAGAYFMLVESKDKKGKTIRTIEFIPLYLKNKIESDESIALNFLEKGRGLKEPKILLKKIKIDTLFDVDGFKMWLSGRTGDRLLFKCANQLILDEKIIVTMKKIVKFIQRRQENRELKLSDKDGIDNEVLMEIYNTFVDKLENTVYRIRLSEQAKTLIDKQKEFERLSLEDKSSTLFEILHIFQCQSSAANLKMIGGPGKAGILVMNNNISKCNKISIINQSPTGIFENEIDLLKI

SEQ ID NO: 65 - protein, 984 aa, Campylobacter jejuni
MAKILAFDIGISSIGWAFSENDELKDCGVRIFTKAENPKTGESLALPRRIARSARKRLARRKARLNHLKHLIANEFKLNYEDYQSFDEILAKAYKGSLISPYELRFRALNELLSKQDFARVILHIAKRRGYDDIKNNGDEEKGKILKAIKQNEEKLANYQSVGEYLYKEYFQKFKENSKEFINVRNKKESYERCIAQSFLKDELKLIFKKQREFGFSFSKKFEEEVLSVAFYKRALKDFSHLVGNCSFFTDEKRAPKNSPLAFMFVALTRIINLLNNLKNTLYTKDDLNALLNEVLKNGTLTYKQTKKLLGLSDDYEFKGEKGNYFIEFKKYKEFIKALGEHSLSQDDLNEIAKDITLIKDEIKLKKALAKYDLNENQIDNLSKLEFKDHLNISFKALKLITPLMLEGKKYDEACNELTLKVAINEDKKDFLPAFNETYYKDEVTNPVVLRAIKEYRKVLNALLKKYGKVHKINIELAREVGKNHSQRAKIEKEQNENYKAKKDAELECEKLGLKINSKNILKLRLFKEQKEFCVYSGEKIKLSDLQDEKMLEIDHIYPYSRSFDDSYMNKVLVFTKQNQEKLNQTPFEAFGNDSAKWQKIEVLAKNLPTKKQKRILDKNYKDKEQKDFKDRNLNDTRYIARLVLNYTKDYLDFLPLSDDENTKLNDTQKGSKVHVEAKSGMLTSALRHTWGFSTKDRNNHLHHAIDAVIIAYANNSIVKAFSDFKKEQESNTAELYAKKISELDYKNKRKFFEPFSGFRQKVLDKIDEIFVSKPERKKPSGALHEETFRKEEEFYQSYGGKEGVLKALELGKIRKVNGKIVKNGDMFRVDIFKHKKTNKFYAVPIYTMDFALKVLPNKAVARSKKGEIKDWILMDENYEFCFSLYKDSLILIQTKDMQEPEFVYYNAFTSSTVSLIVSKHDNKFETLSKNQKILFKNANEKEVIAKSIGIQNLKVFEKYIVSALGEVTKAEFRQREEFKNELR

SEQ ID NO: 66 - protein, 1037 aa, Parvibaculum lavamentivorans
MERIFGFDIGTTSIGFSVIDYSSTQSAGNIQRLGVRIFPEARDPDGTPLNQQRRQKRMMRRQLRRRRIRRKALNETLHEAGFLPAYGSADWPVVMADEPYELRRRGLEEGLSAYEFGRAIYHLAQHRHFKGRELEESDTPDPDVDDEKEAANERAATLKALKNEQTTLGAWLARRPPSDRKRGIHAHRNVVAEEFERLWEVQSKFHPALKSEEMRARISDTIFAQRPVFWRKNTLGECRFMPGEPLCPKGSWLSQQRRMLEKLNNLAIAGGNARPLDAEERDAILSKLQQQASMSWPGVRSALKALYKQRGEPGAEKSLKFNLELGGESKLLGNALEAKLADMFGPDWPAHPRKQEIRHAVHERLWAADYGETPDKKRVIILSEKDRKAHREAAANSFVADFGITGEQAAQLQALKLPTGWEPYSIPALNLFLAELEKGERFGALVNGPDWEGWRRTNFPHRNQPTGEILDKLPSPASKEERERISQLRNPTVVRTQNELRKVVNNLIGLYGKPDRIRIEVGRDVGKSKREREEIQSGIRRNEKQRKKATEDLIKNGIANPSRDDVEKWILWKEGQERCPYTGDQIGFNALFREGRYEVEHIWPRSRSFDNSPRNKTLCRKDVNIEKGNRMPFEAFGHDEDRWSAIQIRLQGMVSAKGGTGMSPGKVKRFLAKTMPEDFAARQLNDTRYAAKQILAQLKRLWPDMGPEAPVKVEAVTGQVTAQLRKLWTLNNILADDGEKTRADHRHHAIDALTVACTHPGMTNKLSRYWQLRDDPRAEKPALTPPWDTIRADAEKAVSEIVVSHRVRKKVSGPLHKETTYGDTGTDIKTKSGTYRQFVTRKKIESLSKGELDEIRDPRIKEIVAAHVAGRGGDPKKAFPPYPCVSPGGPEIRKVRLTSKQQLNLMAQTGNGYADLGSNHHIAIYRLPDGKADFEIVSLFDASRRLAQRNPIVQRTRADGASFVMSLAAGEAIMIPEGSKKGIWIVQGVWASGQVVLERDTDADHSTTTRPMPNPILKDDAKKVSIDPIGRVRPSND

SEQ ID NO: 67 - protein, 1107 aa, Eubacterium ventriosum
MGYTVGLDIGVASVGVAVLDENDNIVEAVSNIFDEADTSNNKVRRTLREGRRTKRRQKTRIEDFKQLWETSGYIIPHKLHLNIIELRNKGLTELLSLDELYCVLLSMLKHRGISYLEDADDGEKGNAYKKGLAFNEKQLKEKMPCEIQLERMKKYGKYHGEFIIEINDEKEYQSNVFTTKAYKKELEKIFETQRCNGNKINTKFIKKYMEIYERKREYYIGPGNEKSRTDYGIYTTRTDEEGNFIDEKNIFGKLIGKCSVYPEEYRASSASYTAQEFNLLNDLNNLKINNEKLTEFQKKEIVEIIKDASSVNMRKIIKKVIDEDIEQYSGARIDKKGKEIYHTFEIYRKLKKELKTINVDIDSFTREELDKTMDILTLNTERESIVKAFDEQKFVYEENLIKKLIEFRKNNQRLFSGWHSFSYKAMLQLIPVMYKEPKEQMQLLTEMNVFKSKKEKYVNYKYIPENEVVKEIYNPVVVKSIRTTVKILNALIKKYGYPESVVIEMPRDKNSDDEKEKIDMNQKKNQEEYEKILNKIYDEKGIEITNKDYKKQKKLVLKLKLWNEQEGLCLYSGKKIAIEDLLNHPEFFEIDHIIPKSISLDDSRSNKVLVYKTENSIKENDTPYHYLTRINGKWGFDEYKANVLELRRRGKIDDKKVNNLLCMEDITKIDVVKGFINRNLNDTRYASRVVLNEMQSFFESRKYCNTKVKVIRGSLTYQMRQDLHLKKNREESYSHHAVDAMLIAFSQKGYEAYRKIQKDCYDFETGEILDKEKWNKYIDDDEFDDILYKERMNEIRKKIIEAEEKVKYNYKIDKKCNRGLCNQTIYGTREKDGKIHKISSYNIYDDKECNSLKKMINSGKGSDLLMYNNDPKTYRDMLKILETYSSEKNPFVAYNKETGDYFRKYSKNHNGPKVEKVKYYSGQINSCIDISHKYGHAKNSKKVVLVSLNPYRTDVYYDNDTGKYYLVGVKYNHIKCVGNKYVIDSETYNELLRKEGVLNSDENLEDLNSKNITYKFSLYKNDIIQYEKGGEYYTERFLSRIKEQKNLIETKPINKPNFQRKNKKGEWENTRNQIALAKTKYVGKLVTDVLGNCYIVNMEKFSLVVDK

SEQ ID NO: 68 - protein, 1136 aa, Streptococcus gordonii
MNGLVLGLDIGIASVGVGILEKDTGKIIHASSRLFPAATADNNVERRSNRQGRRLNRRKKHRSVRLQDLFEGYGLLTDFSKVSMNLNPYQLRVQGMENQLTNEELFVALKNIVKRRGISYLDDASEDGGTVSSDYGKAVEENRKLLAEKTPGQIQLERFEKYGQLRGDFTVEENGEKHRLINVFSTSAYRKEAERILRKQQEFNSKITDEFIEDYLIILTGKRKYYHGPGNEKSRTDYGRFRTDGTTLDNIFGILIGKCTFYTEEYRASKASYTAQEFNLLNDLNNLTVPTETKKLSEEQKKLIIEYAKSAKTLGASTLLKYIAKMIDASVDQIRGYRVDVNNKPEMHTFEVYRKMQSLETIKVEELPRKVLDELAHILTLNTEREGIEEAINSKLKDIFNRDQVLELVQFRKNNSSLFSKGWHNFSIKLMMELIPELYETSEEQMTILTRLGKQRSKETSKRTKYIDEKELTEEIYNPVVAKSVRQAIKIINEATKKYGIFDNIVIEMARENNEEDAKKDYIKRQKANQDEKNAAMEKAAFQYNGKKELPDNIFHGHKELTTKIRLWHQQGEKCLYTGKNIPISDLIHNQYKYEIDHILPLSLSFDDSLSNKVLVLATANQEKGQRTPFQALDSMDDAWSYREFKSYVKDSKLLSNKKKDYLLTEEDISKIEVKQKFIERNLVDTRYSSRVVLNALQDFYKSHQLDTTISVVRGQFTSQLRRKWGIEKSRETYHHHAVDALIIAASSQLRLWKKHSNPLIAYKEGQFVDSETGEIVSLSDEEYKELVFKAPYDHFVDTLRSKKFEDSILFSYQVDSKYNRKISDATIYATRKAKLDKEKKEYTYTLGKIKDIYALGTKTPSKTGFYKFLDLYKTDKSQFLMYQKDRKTWDEVIEKIIEQYRPFKEYDKNGKEVDFNPFEKYRIGNGPIRKYSKKGNGPEIKSLKYYDILLGKHKNITPDGSRNTVALLSLNPWRTDVYYNSETKKYEFLGLKYADLCFEEGGAYGISEVKYKKIREKEGIGKNSEFKFTLYKNDLILIKDTETNCQQFFRFWSRTGKDNPKSFEKHKIELKPYEKAKFEKGEELKVLGKVPPSSNQFQKNMQIENLSIYKVKTDILGNKHFIKKEGDEPKLKFKK

SEQ ID NO: 69 - protein, 984 aa, Campylobacter jejuni
MARILAFDIGISSIGWAFSENDELKDCGVRIFTKAENPKTGESLALPRRLARSARKRLARRKARLNHLKHLIANEFKLNYEDYQSFDESLAKAYKGSLISPYELRFRALNELLSKQDFARVILHIAKRRGYDDIKNNGDEEKSEILKAIKQNEEKLVNYQSVGEYLYKEYFQKFKENSKEFINVRNKKESYERCITQSFLKDELKLIFQKQREFGFSFSKKFEEEVLSVAFYKRALKDFSHLVGNCSFFTDEKRAPKNSPLAFMFVALTRIINILNNLKNTEGILYTKDDLNALLNEVLKNGTLTYKQTKKLLGLSDDYEFKGEKGTYFIEFKKYKEFIKALGEHNLSQDDLNEIAKDITLIKDEIKLKKALAKYDLNQNQIDSLSKLEFKDHLNISFKALKLITPLMLEGKKYDEACNELNLKVAINEDKKDFLPAFNETYYKDEVTNPVVLRAIKEYRKILNALLKKYGKVHKINIELAREVGKNHSQRAKIEKEQNENYKAKKDAEIECEKLGLKINSKNILKLRLFKEQKEFCAYSGEKIKLSDLQDEKMLEIDHIYPYSRSFDDSYMNKVLVFTKQNQEKLNKTPFEAFGNDSTKWQKIEVLAKNLPEKKQKRILDKNYKDKEQKDFKDRNLNDTRYIARLVLNYTKDYLDFLPLSDDENTKLNDTQKGSKVHVEAKSGMLTSALRHTWGFSAKDRNNHLHHAIDAAIIAYANNSIVKAFSDFKKEQESNSVELYAKKISELDYKNKRKFFEPFSGFRQKVLDKIDEIFVSKPERKKPSGALHEETFRKEEEFYQSYGGKEGVLKALELGKIRKVNGKIVKNGDMFRVDIFKHKKTNKFYAVPIYTMDFALKVLPNKAVARSKKGEIKDWILMDENYEFCFSLYKDSLILIQTKDMQEPELVYFNAFTSSTVSLIVSKHDNKFETLSKNQKILFKNANEKEVIAKSIGIQNLKVFEKYIVSALGEVTKAEFRQREDFKK

SEQ ID NO: 70 - protein, 1079 aa, Dinoroseobacter shibae
MRLGLDIGTSSIGWWLYETDGAGSDARITGVVDGGVRIFSDGRDPKSGASLAVDRRAARAMRRRRDRYLRRRATLMKVLAETGLMPADPAEAKALEALDPFALRAAGLDEPLPLPHLGRALFHLNQRRGFKSNRKTDRGDNESGKIKDATARLDMEMMANGARTYGEFLHKRRQKATDPRHVPSVRTRLSIANRGGPDGKEEAGYDFYPDRRHLEEEFHKLWAAQGAHHPELTETLRDLLFEKIFFQRPLKEPEVGLCLFSGHHGVPPKDPRLPKAHPLTQRRVLYETVNQLRVTADGREARPLTREERDQVIHALDNKKPTKSLSSMVLKLPALAKVLKLRDGERFTLETGVRDAIACDPLRASPAHPDRFGPRWSILDADAQWEVISRIRRVQSDAEHAALVDWLTEAHGLDRAHAEATAHAPLPDGYGRLGLTATTRILYQLTADVVTYADAVKACGWHHSDGRTGECFDRLPYYGEVLERHVIPGSYHPDDDDITRFGRITNPTVHIGLNQLRRLVNRIIETHGKPHQIVVELARDLKKSEEQKRADIKRIRDTTEAAKKRSEKLEELEIEDNGRNRMLLRLWEDLNPDDAMRRFCPYTGTRISAAMIFDGSCDVDHILPYSRTLDDSFPNRTLCLREANRQKRNQTPWQAWGDTPHWHAIAANLKNLPENKRWRFAPDAMTRFEGENGFLDRALKDTQYLARISRSYLDTLFTKGGHVWVVPGRFTEMLRRHWGLNSLLSDAGRGAVKAKNRTDHRHHAIDAAVIAATDPGLLNRISRAAGQGEAAGQSAELIARDTPPPWEGFRDDLRVRLDRIIVSHRADHGRIDHAARKQGRDSTAGQLHQETAYSIVDDIHVASRTDLLSLKPAQLLDEPGRSGQVRDPQLRKALRVATGGKTGKDFENALRYFASKPGPYQAIRRVRIIKPLQAQARVPVPAQDPIKAYQGGSNHLFEIWRLPDGEIEAQVITSFEAHTLEGEKRPHPAAKRLLRVHKGDMVALERDGRRVVGHVQKMDIANGLFIVPHNEANADTRNNDKSDPFKWIQIGARPAIASGIRRVSVDEIGRLRDGGTRPI

SEQ ID NO: 71 - protein, 1096 aa, Eubacterium dolichum
MMEVFMGRLVLGLDIGITSVGFGIIDLDESEIVDYGVRLFKEGTAAENETRRTKRGGRRLKRRRVTRREDMLHLLKQAGIISTSFHPLNNPYDVRVKGLNERLNGEELATALLHLCKHRGSSVETIEDDEAKAKEAGETKKVLSMNDQLLKSGKYVCEIQKERLRTNGHIRGHENNFKTRAYVDEAFQILSHQDLSNELKSAIITIISRKRMYYDGPGGPLSPTPYGRYTYFGQKEPIDLIEKMRGKCSLFPNEPRAPKLAYSAELFNLLNDLNNLSIEGEKLTSEQKAMILKIVHEKGKITPKQLAKEVGVSLEQIRGFRIDTKGSPLLSELTGYKMIREVLEKSNDEHLEDHVFYDEIAEILTKTKDIEGRKKQISELSSDLNEESVHQLAGLTKFTAYHSLSFKALRLINEEMLKTELNQMQSITLFGLKQNNELSVKGMKNIQADDTAILSPVAKRAQRETFKVVNRLREIYGEFDSIVVEMAREKNSEEQRKAIRERQKFFEMRNKQVADIIGDDRKINAKLREKLVLYQEQDGKTAYSLEPIDLKLLIDDPNAYEVDHIIPISISLDDSITNKVLVTHRENQEKGNLTPISAFVKGRFTKGSLAQYKAYCLKLKEKNIKTNKGYRKKVEQYLLNENDIYKYDIQKEFINRNLVDTSYASRVVLNTLTTYFKQNEIPTKVFTVKGSLTNAFRRKINLKKDRDEDYGHHAIDALIIASMPKMRLLSTIFSRYKIEDIYDESTGEVFSSGDDSMYYDDRYFAFIASLKAIKVRKFSHKIDTKPNRSVADETIYSTRVIDGKEKVVKKYKDIYDPKFTALAEDILNNAYQEKYLMALHDPQTFDQIVKVVNYYFEEMSKSEKYFTKDKKGRIKISGMNPLSLYRDEHGMLKKYSKKGDGPAITQMKYFDGVLGNHIDISAHYQVRDKKVVLQQISPYRTDFYYSKENGYKFVTIRYKDVRWSEKKKKYVIDQQDYAMKKAEKKIDDTYEFQFSMHRDELIGITKAEGEALIYPDETWHNFNFFFHAGETPEILKFTATNNDKSNKIEVKPIHCYCKMRLMPTISKKIVRIDKYATDVVGNLYKVKKNTLKFEFD

SEQ ID NO: 72 - protein, 1082 aa, Neisseria meningitidis
MAAFKPNPINYILGLDIGIASVGWAMVEIDEDENPICLIDLGVRVFERAEVPKTGDSLAMARRLARSVRRLTRRRAHRLLRARRLLKREGVLQAADFDENGLIKSLPNTPWQLRAAALDRKLTPLEWSAVLLHLIKHRGYLSQRKNEGETADKELGALLKGVADNAHALQTGDFRTPAELALNKFEKESGHIRNQRGDYSHTFSRKDLQAELNLLFEKQKEFGNPHISDGLKEGIETLLMTQRPALSGDAVQKMLGHCTFEPAEPKAAKNTYTAERFIWLTKLNNLRILEQGSERPLTDTERTTLIDEPYRKSKLTYAQARKLLELDNTAFFKGLRYGKDNAEASTLMEMKAYHAISRALEKEGLKDKKSPLNLSPELQDEIGTAFSLFKTDEDITGRLKDRVQPEILEALLKHISFDKFVQISLKALRRIVPLMEQGKRYDEACAEIYGDHYGKKNTEEKIDLPPIPADEIRNPVVLRALSQARKVINGVVRRYGSPARIHIETAREVGKSFKDRKEIEKRQEENRKDREKAATKFREYFPNFVGEPKSKDILKLRLYEQQHGKCLYSGKEINLGRLNEKGYVEIDHALPFSRTWDDSFNNKVLVLGSENQNKGNQTPYEYFNGKDNSREWQEFKARVETSRFPRSKKQRILLQKFDEEGFKERNLNDTRYVNRFLCQFVADHMLLTGKGKRRVFASNGQITNLLRGFWGLRKVRAENDRHHALDAVVVACSTVAMQQKITRFVRYKEMNAFDGKTIDKETGEVLHQKTHFPQPWEFFAQEVMIRVFGKPDGKPEFEEADTPEKLRTLLAEKLSSRPEAVHEYVTPLFVSRAPNRKMSGQGHMETVKSAKRLDEGVSVLRVPLTQLKLKDLEKMVNREREPKLYEALKARLEAHKDDPAKAFAEPFYKYDKAGNRTQQVKAVRVEQVQKTGVWVRNHNGIADNATMVRVDVFEKGDKYYLVPIYSWQVAKGILPDRAVVQGKDEEDWQLIDDSFNFKFSLHPNDLVEVITKKARMFGYFASCHRGTGNINIRIHDLDHKIGKNGILEGIGVKTALSFQKYQIDELGKEIRPCRLKKRPPVR

SEQ ID NO: 73 - protein, 1050 aa, Gluconacetobacter diazotrophicus
MGENMIDESLTFGIDLGIGSCGWAVLRRPSAFGRKGVIEGMGSWCFDVPETSKERTPTNQIRRSNRLLRRVIRRRRNRMAAIRRLLHAAGLLPSTDSDALKRPGHDPWELRARGLDKPLKPVEFAVVLGHIAKRRGFKSAAKRKATNISSDDKKMLTALEATRERLGRYRTVGEMFARDPDFASRRRNREGKYDRTTARDDLEHEVHALFAAQRRLGQGFASPELEEAFTASAFHQRPMQDSERLVGFCPFERTEKRAAKLTPSFERFRLLARLLNLRITTPDGERPLTVDEIALVTRDLGKTAKLSIKRVRTLIGLEDNQRFTTIRPEDEDRDIVARTGGAMTGTATLRKALGEALWTDMQERPEQLDAIVQVLSFFEANETITEKLREIGLTLAVLDVLLTALDAGVFAKFKGAAHISTKAARNLLPHLEQGRRYDEACTMAGYDHAASRLSHHGQIVAKTQFNALVTEIGESIANPIARKALIEGLKQIWAMRNHWGLPGSIHVELARDVGNSIEKRREIEKHIEKNTALRARERREVHDLLDLEDVNGDTLLRYRLWKEQGGKCLYTGKAIHIRQIAATDNSVQVDHILPWSRFGDDSFNNKTLCLASANQQKKRSTPYEWLSGQTGDAWNAFVQRIETNKELRGFKKRNYLLKNAKEAEEKFRSRNLNDTRYAARLFAEAVKLLYAFGERQEKGGNRRVFTRPGALTAALRQAWGVESLKKQDGKRINDDRHHALDALTVAAVDEAEIQRLTKSFHEWEQQGLGRPLRRVEPPWESFRADVEATYPEVFVARPERRRARGEGHAATIRQVKERECTPIVFERKAVSSLKEADLERIKDGERNEAIVEAIRSWIATGRPADAPPRSPRGDIITKIRLATTIKAAVPVRGGTAGRGEMVRADVFSKPNRRGKDEWYLVPVYPHQIMNRKAWPKPPMRSIVANKDEDEWTEVGPEHQFRFSLYPRSNIEIIRPSGEVIEGYFVGLHRNTGALTISAHNDPKSIHSGIGTKTLLAISKYQVDRFGRKSPVRKEVRTWHGEACISPTPPG

SEQ ID NO: 74 - protein, 1391 aa, Kordia algicida
MKKILGLDLGTNSIGWALVNEAEHEHEQSSIVKLGVRVNPLSVDEKTNFEKGRPLSINADRTSKRSARRNLQRFKLRRKNLINLLLKHHIISNETILTEVGKNTTHQTLKLRSKATQEKISLEEFARILLSINKKRGYKSSRKEKNEDEGFTIDGMAIAKELYDNQLTPGQYVYNILQDGKNYIPDFYRSDLQAEFDDVWQFQKKFYSSILTDEFYLKLKGQGKENTRKLFLAIHQVYTAENKGKRDAVKLQYYKWRSEAVKKQLSIEEVAYVLVEINNNINKSSGYLGAISDRSKALYFNNETVGEYLYGQLVKNRHNSLRNQVFYRQDYLDEFEKIWETQAKFYDELTNELKQEIRDVVIFYQRKLKSQKHLISDCLFEKHHKAIPKSSPLFQEFKIWQNLNYLEFVHTQSKEKIFFSELDDETRQFVFAELNIRGTLKIKEIKKLIGLETPVYWKSNFDEIEGNRTNQVLYNVYQNIADDLGYGFDWSKKHAFEINAELQAIFKDVGIDTAILNFDASIEENDFDKQKSYQLWHLLYSAEDTDKATEEDKLIYGNINTKLKKQLHQKYGFEAKYGNLLANISLQQDYGNLSAKAIKKILPYLESGNSFYEACTIVGYNPSNSLTKEQQQNRKLKDKLELLPKNSLRNPVVEKILNQKVNLINQLIDEYGKPDEVRIELARELKKSAKQRADLSKHINDATLKNQNIRKTLQKDFGIQNPSKNDVIRYKLYDELKDNGYKTLFTNKYIPKEQLFSKDVDIEHIIPKAILFDDSFSNKTLAYRNVNLAKADATAFDFISSKHLDDLDNYKARVETLFQSKRISKGKYKKLLMTRQNLPEDFIERDLRNSQYIAKKATAMLKEVFRSVVPTSGRITDKLREDWDLVNVMKELNLPKYRTLGLTEFIERKNGNKIEQIIDWTKRNDHRHHAMDALTVAFTTHNHIQYLNNLNVTHGLNGVDTDHEKSRLYAIKQAITKVYIVGKTKKRKFIPPMENFRSHAKNHLEGILISFKNKNKVVTKNKNRTKTKTKGVFNEKIQLTPRGQLHKETIYGHAKKVIVTKEKVSSKFTHEKILQVTKPAYREALLKRLASFKNDPKKAFSGKNALSKNPLYFDITSGKKVPDTVKLSYFENSYVIRKEVNSDNFKNEKSLQKVLDVGIRRILEKRLADYNGNAKEAFSNLEKNPIWKDKEKGVCIKKVRIEALKNAEPLHVKKDHLGKIILDDENKSTPVDFISTGNNHHVAIYEDKDGKLHDKVVSFYEVVSRVNLGLPIIDKSFNSHLDWKFLFSMKQNEMFVFPSEDFNPKEIDIGNPKNNELISKYLFRVQKFSKVTYGNSAVRDYVFRHHLETELIDKKELKGITYYQLKSIGMLEKLVKVRINHIGKIVHIGEY

SEQ ID NO: 75 - protein, 1116 aa, Clostridium spiroforme
MVEFLLKEMKIMGRLVLGLDIGITSVGYGVIDIDKNEFVDYGVRLFKEGTAINNEERRSKRGARRLKRRKTNRIADMKKLLERNGLIDEQYTALNNPYEIRKKGLKNKLSNYELATAILHITKNRGTCLESNADETQDEESTKNILSKNALELKDKYICEIQLARLEESGKIRGINNNFKTEDYLKELSKILENQDLEKETIDKIKEIVARRRRYDQGPGSEKSPTPYGSYRMENGELVHVNLIDMMRGKCSVFPDQLRAPQQSYSAELFNLLNDLNNLKINGEKLSSTEKQKIIDFVNEKGGITVKQLLKLIDVGITEISGFRIDKNEKPLITEFKGYKKVLKVFKNYNQESLLNDKSIVDTIMDINTKIKSIDERSDQLKQVLPSLDTSIINDLASIKGVSGYHSLSLKALNLINNEMLKTEMNQMQVLHQLDIFDKNRVSLKGQRQIYADDNAILSPVAKRAHRETFKVINKLRSIYGEFDSIVIETTRDKNTQDQKKRIKNNQKNYEERNTEVNNFLKEAGYNPENINAKTKMKIRLYIEQDAKSAYTLQDINLKELIEDEKAYEIDHIIPISISLDDSFNNKVLTTHDENQEKGNLTPISAFLKGKFHNGNLNTYKVFIQNNKNLNRKKKEYLLCEDDITRYEVVQNFINRNLVDTSYACRTVMNTLVHYFKDNEINTKVHTIKGQATSTFRKRIGLIKDREEDYFHHAIDALIVASLKKMNLINSYLMKVDFNEMYDEETGEIFNVLPDNSYLDEKYISFVSNLKNIYEESNKYIRGVMIKEKMTYPLIKVSHKIDTKPNRKISDDTIYSTRNVDNQDMLVERIKNIYDPKENAANTLINDIINDNTDKYIMYHKDPQTFDKIKAIVLNHFNEFKTDKNCYIVTKEGLYKLKGTSPLALYYEEFGPITKYAKKNNGPTIHSMKFYSEKLGNHLSITHKYSTVNKKVITKQISPYRTDFYQSPEGKYKFVTVRYKDVAYNAKKDKYIIDHSWYREQKKLKKIADEWIFVCSVHRDELIGIMKADGQKRIFDSSTESDGETLYHDAKTYEILKFTATNNDITGRFEVKPIYCYCKKQLMVSIGTCRKIQKFATDVLGNLYIVKDNVLKLEFK

SEQ ID NO: 76 - protein, 1348 aa, Finegoldia magna
MKSEKKYYIGLDVGTNSVGWAVTDEFYNILRAKGKDLWGVRLFEKADTAANTRIFRSGRRRNDRKGMRLQILREIFEDEIKKVDKDFYDRLDESKFWAEDKKVSGKYSLFNDKNFSDKQYFEKFPTIFHLRKYLMEEHGKVDIRYYFLAINQMMKRRGHFLIDGQISHVTDDKPLKEQLILLINDLLKIELEEELMDSIFEILADVNEKRTDKKNNLKELIKGQDFNKQEGNILNSIFESIVTGKAKIKNIISDEDILEKIKEDNKEDFVLTGDSYEENLQYFEEVLQENITLFNTLKSTYDFLILQSILKGKSTLSDAQVERYDEHKKDLEILKKVIKKYDEDGKLFKQVFKEDNGNGYVSYIGYYLNKNKKITAKKKISNIEFTKYVKGILEKQCDCEDEDVKYLLGKIEQENFLLKQISSINSVIPHQIHLFELDKILENLAKNYPSFNNKKEEFTKIEKIRKTFTFRIPYYVGPLNDYHKNNGGNAWIFRNKGEKIRPWNFEKIVDLHKSEEEFIKRMLNQCTYLPEETVLPKSSILYSEYMVLNELNNLRINGKPLDTDVKLKLIEELFKKKTKVTLKSIRDYMVRNNFADKEDFDNSEKNLEIASNMKSYIDFNNILEDKFDVEMVEDLIEKITIHTGNKKLLKKYIEETYPDLSSSQIQKIINLKYKDWGRLSRKLLDGIKGTKKETEKTDTVINFLRNSSDNLMQIIGSQNYSFNEYIDKLRKKYIPQEISYEVVENLYVSPSVKKMIWQVIRVTEEITKVMGYDPDKIFIEMAKSEEEKKTTISRKNKLLDLYKAIKKDERDSQYEKLLTGLNKLDDSDLRSRKLYLYYTQMGRDMYTGEKIDLDKLFDSTHYDKDHIIPQSMKKDDSIINNLVLVNKNANQTTKGNIYPVPSSIRNNPKIYNYWKYLMEKEFISKEKYNRLIRNTPLTNEELGGFINRQLVETRQSTKAIKELFEKFYQKSKIIPVKASLASDLRKDMNTLKSREVNDLHHAHDAFLNIVAGDVWNREFTSNPINYVKENREGDKVKYSLSKDFTRPRKSKGKVIWTPEKGRKLIVDTLNKPSVLISNESHVKKGELFNATIAGKKDYKKGKIYLPLKKDDRLQDVSKYGGYKAINGAFFFLVEHTKSKKRIRSIELFPLHLLSKFYEDKNTVLDYAINVLQLQDPKIIIDKINYRTEIIIDNFSYLISTKSNDGSITVKPNEQMYWRVDEISNLKKIENKYKKDAILTEEDRKIMESYIDKIYQQFKAGKYKNRRTTDTIIEKYEIIDLDTLDNKQLYQLLVAFISLSYKTSNNAVDFTVIGLGTECGKPRITNLPDNTYLVYKSITGIYEKRIRIK

SEQ ID NO: 77 - protein, 1129 aa, Streptococcus infantarius
MSNGKILGLDIGVASVGVGIIDSKTGNVIHANSRLFSAANAENNAERRGFRGARRLTRRKKHRVKRVRDLFEKYDISTDFRNLNLNPYELRVKGLTEQLTNEELFAALRTIAKRRGISYLDDAEDDSTGSSDYAKSIDENRRLLKTKTPGQIQLERLEKYGQLRGNFTVYDENGEAHRLINVFSTSDYKNEARKILETQSNYNKQITDEFIEDYIEILTQKRKYYHGPGNEKSRTDYGRFRTDGTTLENIFGILIGKCSFYPEEYRASKASYTAQEFNFLNDLNNLKVPTETGKLSTEQKEYLVDFAKKSKALGASKLLKEIAKIVDCSVDDIKGYRVDNKDKPDLHTFEPYRKLKFNLSSIDIDELSRETLDKLADILTLNTEREGIEDAIKRNLPSQFTEEQISEIVQIRKNQSSAFNKGWHSFSAKLMNELIPELYVTSEEQMTILTRLEKFKVNKKSSKNTKTIDEKEITDEIYNPVVAKSVRQTIKIINAAVKKYGDFDKIVIEMPRDKNAEDEKKFIDKKQKENKKEKDDSLKRAAFLYNGTDNLPDGVFHGNKELKTKIRLWYQQGERCLYSGKLISIHDLVHNSNKFEIDHILPLSLSFDDSLANKVLVYAWTNQEKGQKTPYQVIDSMDTAWSFREMKDYVLKQKGLGKKKCEYLLTTENIDKIEVKKKFIERNLVDTRYASRVVLNSLQTALKELGKDTKVSVVRGQFTSQLRRKWNIDKSRETYHHHAVDALIIAASSQLKLWQKQENPMFESYGENQVVNKETGEILSISDDKYKELVFQPPYQGFVNTISSKGFEDEILFSYQVDSKFNRKVSDATIYSTRKAKLGKDKKDETYVLGKIKDIYSQDGFDTFIKRYKKDKTQFLMYQKDPLTWENVIEVILRDYPSEKLSEDGKKTVKCNPFEEYRRENGLICKYSKKGNGTPIKSLKYYDKKLGNCIDITPEKSKNRVVLRQISPWRADIYFNLETLKYELMGLKYSDLSFEKGTGKYHISQEKYDAIREKEGIGKKSEFKFTLYRNDLILIKDTLNNCERMLRFGSKNDTSKHYVELKPLEKGTFDSEEEILPVLGKVAKSGQFIKGLNKPNISIYKVRTDVLGNKFFIKKEGDKPKLDFKNNNK

SEQ ID NO: 78 - protein, 1065 aa, Clostridium perfringens
MNKDINYALGLDIGITSVGWAVINLDLNRIEDLGVRIFNAAENLKDGSSLALPRRLARGRRRLLRRKAYRVERVRKLILKNNILTKEELEGLFKNKEVIDVWEARVKGLDYKLSREEWAKILINFCKRRGFKSNRKNEAKDKEAGQILSSISYNIEKMKETNSRTIGEYIYNEVKNSEDSYAPLRNKFGEYKMCVSRDVIREEIHTLFEKQRELGNNFASDEIEDKYFEIFNSQRPFSNFEDLEKLVGFCTFERKKHKRAPKHCISSEEFTLYEGINKLSIIKDGEKRKLSEEERTLVVNEAFNKKEIKYTTLRKLLGLSEEELFSTLTYSIDKDISKTENTKFVSLKGYHEIKRAIEKGVSKKAWQDIENNRNLLNDIAYVLTLGKTDDEIEKQLRLRNVPEELFESLLDMSFNKFNNLSIYALEKILPFMKEGYQYNEACEKAGYNFKAIYEGVRTKKLPVIEIDEIVNPVVNRALAQTRKVINSVIDKYGSPVRINIELARDLAKNFKDRKLIEKEQKENRANLDKIRENLRELMDKEPTVVEVLKYRLWEQQRGECAYTQSQIPLERLFSPGYCEIDHIIPFSRSFDDSLSNKILVLGSENQRKGNRTPYEYFGEDSERWNSFEIWVKGSYLNYKKKANLLKKKFSEEEQRDWKARNLQDTKYICRYISNFVNNRLEFKESENKQKVITVNGRATAYLRSRWGLNKVREDGDKHHALDAAVVGVTTQGMVQKISKYSKAHELYTVRKNDEFVDVETGECVDVDEYKEIRKDILPRPWRGFSEELKLRLSDNPLEELKKSPIETYNEEFIKENVKPIFVSRVPFRKISGKLFKETIYSERAFKDGYFVSKKSLVDLKRGDLDNFYNYECDKKLYDAISERMKEFNYNGKKAFESPFRKPTKSGKEGPVVRSVKIKSAVPFKDGIPMNEGLVAKEGMVRIDIYEKEGKYFVVPVYRYQLAKGIVPKRAAIAKKDELKWPIMDQTYNFKFSIYKNDLIEVKYDKKGVYFGYYDGFDRNSASLTIEKHDNSERYRSIGLKVGVLEINKYEVDVLGNYHKVKLGGN

SEQ ID NO: 79 - protein, 1195 aa, Elusimicrobium minutum
MQKNINTKQNHIYIKQAQKIKEKLGDKPYRIGLDLGVGSIGFAIVSMEENDGNVLLPKEIIMVGSRIFKASAGAADRKLSRGQRNNHRHTRERMRYLWKVLAEQKLALPVPADLDRKENSSEGETSAKRFLGDVLQKDIYELRVKSLDERLSLQELGYVLYHIAGHRGSSAIRTFENDSEEAQKENTENKKIAGNIKRLMAKKNYRTYGEYLYKEFFENKEKHKREKISNAANNHKFSPTRDLVIKEAEAILKKQAGKDGFHKELTEEYIEKLTKAIGYESEKLIPESGFCPYLKDEKRLPASHKLNEERRLWETLNNARYSDPIVDIVTGEITGYYEKQFTKEQKQKLFDYLLTGSELTPAQTKKLLGLKNTNFEDIILQGRDKKAQKIKGYKLIKLESMPFWARLSEAQQDSFLYDWNSCPDEKLLTEKLSNEYHLTEEEIDNAFNEIVLSSSYAPLGKSAMLIILEKIKNDLSYTEAVEEALKEGKLTKEKQAIKDRLPYYGAVLQESTQKIIAKGFSPQFKDKGYKTPHTNKYELEYGRIANPVVHQTLNELRKLVNEIIDILGKKPCEIGLETARELKKSAEDRSKLSREQNDNESNRNRIYEIYIRPQQQVIITRRENPRNYILKFELLEEQKSQCPFCGGQISPNDIINNQADIEHLFPIAESEDNGRNNLVISHSACNADKAKRSPWAAFASAAKDSKYDYNRILSNVKENIPHKAWRFNQGAFEKFIENKPMAARFKTDNSYISKVAHKYLACLFEKPNIICVKGSLTAQLRMAWGLQGLMIPFAKQLITEKESESFNKDVNSNKKIRLDNRHHALDAIVIAYASRGYGNLLNKMAGKDYKINYSERNWLSKILLPPNNIVWENIDADLESFESSVKTALKNAFISVKHDHSDNGELVKGTMYKIFYSERGYTLTTYKKLSALKLTDPQKKKTPKDFLETALLKFKGRESEMKNEKIKSAIENNKRLFDVIQDNLEKAKKLLEEENEKSKAEGKKEKNINDASIYQKAISLSGDKYVQLSKKEPGKFFAISKPTPTTTGYGYDTGDSLCVDLYYDNKGKLCGEIIRKIDAQQKNPLKYKEQGFTLFERIYGGDILEVDFDIHSDKNSFRNNTGSAPENRVFIKVGTFTEITNNNIQIWFGNIIKSTGGQDDSFTINSMQQYNPRKLILSSCGFIKYRSPILKNKEG

SEQ ID NO: 80 - protein, 1101 aa, Akkermansia muciniphila
MSRSLTFSFDIGYASIGWAVIASASHDDADPSVCGCGTVLFPKDDCQAFKRREYRRLRRNIRSRRVRIERIGRLLVQAQIITPEMKETSGHPAPFYLASEALKGHRTLAPIELWHVLRWYAHNRGYDNNASWSNSLSEDGGNGEDTERVKHAQDLMDKHGTATMAETICRELKLEEGKADAPMEVSTPAYKNLNTAFPRLIVEKEVRRILELSAPLIPGLTAEIIELIAQHHPLTTEQRGVLLQHGIKLARRYRGSLLFGQLIPRFDNRIISRCPVTWAQVYEAELKKGNSEQSARERAEKLSKVPTANCPEFYEYRMARILCNIRADGEPLSAEIRRELMNQARQEGKLTKASLEKAISSRLGKETETNVSNYFTLHPDSEEALYLNPAVEVLQRSGIGQILSPSVYRIAANRLRRGKSVTPNYLLNLLKSRGESGEALEKKIEKESKKKEADYADTPLKPKYATGRAPYARTVLKKVVEEILDGEDPTRPARGEAHPDGELKAHDGCLYCLLDTDSSVNQHQKERRLDTMTNNHLVRHRMLILDRLLKDLIQDFADGQKDRISRVCVEVGKELTTFSAMDSKKIQRELTLRQKSHTDAVNRLKRKLPGKALSANLIRKCRIAMDMNWTCPFTGATYGDHELENLELEHIVPHSFRQSNALSSLVLTWPGVNRMKGQRTGYDFVEQEQENPVPDKPNLHICSLNNYRELVEKLDDKKGHEDDRRRKKKRKALLMVRGLSHKHQSQNHEAMKEIGMTEGMMTQSSHLMKLACKSIKTSLPDAHIDMIPGAVTAEVRKAWDVFGVFKELCPEAADPDSGKILKENLRSLTHLHHALDACVLGLIPYIIPAHHNGLLRRVLAMRRIPEKLIPQVRPVANQRHYVLNDDGRMMLRDLSASLKENIREQLMEQRVIQHVPADMGGALLKETMQRVLSVDGSGEDAMVSLSKKKDGKKEKNQVKASKLVGVFPEGPSKLKALKAAIEIDGNYGVALDPKPVVIRHIKVFKRIMALKEQNGGKPVRILKKGMLIHLTSSKDPKHAGVWRIESIQDSKGGVKLDLQRAHCAVPKNKTHECNWREVDLISLLKKYQMKRYPTSYTGTPR

SEQ ID NO: 81 - protein, 1187 aa, Bifidobacterium longum
MLSRQLLGASHLARPVSYSYNVQDNDVHCSYGERCFMRGKRYRIGIDVGLNSVGLAAVEVSDENSPVRLLNAQSVIHDGGVDPQKNKEAITRKNMSGVARRTRRMRRRKRERLHKLDMLLGKFGYPVIEPESLDKPFEEWHVRAELATRYIEDDELRRESISIALRHMARHRGWRNPYRQVDSLISDNPYSKQYGELKEKAKAYNDDATAAEEESTPAQLVVAMLDAGYAEAPRLRWRTGSKKPDAEGYLPVRLMQEDNANELKQIFRVQRVPADEWKPLFRSVFYAVSPKGSAEQRVGQDPLAPEQARALKASLAFQEYRIANVITNLRIKDASAELRKLTVDEKQSIYDQLVSPSSEDITWSDLCDFLGFKRSQLKGVGSLTEDGEERISSRPPRLTSVQRIYESDNKIRKPLVAWWKSASDNEHEAMIRLLSNTVDIDKVREDVAYASAIEFIDGLDDDALTKLDSVDLPSGRAAYSVETLQKLTRQMLTTDDDLHEARKTLFNVTDSWRPPADPIGEPLGNPSVDRVLKNVNRYLMNCQQRWGNPVSVNIEHVRSSFSSVAFARKDKREYEKNNEKRSIFRSSLSEQLRADEQMEKVRESDLRRLEAIQRQNGQCLYCGRTITFRTCEMDHIVPRKGVGSTNTRTNFAAVCAECNRMKSNTPFAIWARSEDAQTRGVSLAEAKKRVTMFTFNPKSYAPREVKAFKQAVIARLQQTEDDAAIDNRSIESVAWMADELHRRIDWYFNAKQYVNSASIDDAEAETMKTTVSVFQGRVTASARRAAGIEGKIHFIGQQSKTRLDRRHHAVDASVIAMMNTAAAQTLMERESLRESQRLIGLMPGERSWKEYPYEGTSRYESFHLWLDNMDVLLELLNDALDNDRIAVMQSQRYVLGNSIAHDATIHPLEKVPLGSAMSADLIRRASTPALWCALTRLPDYDEKEGLPEDSHREIRVHDTRYSADDEMGFFASQAAQIAVQEGSADIGSAIHHARVYRCWKTNAKGVRKYFYGMIRVFQTDLLRACHDDLFTVPLPPQSISMRYGEPRVVQALQSGNAQYLGSLVVGDEIEMDFSSLDVDGQIGEYLQFFSQFSGGNLAWKHWVVDGFFNQTQLRIRPRYLAAEGLAKAFSDDVVPDGVQKIVTKQGWLPPVNTASKTAVRIVRRNAFGEPRLSSAHHMPCSWQWRHE

SEQ ID NO: 82 - protein, 166 aa, uncultured Termite
MNKVQEIEYKKIREKLADREYRIGLDLGVGSIGYVVVSLKECNDLSYLPEDIILSGSRIFKSSIGAVERREFRLQRNSHRHHRERMRFLWQLLAEKQLALQSSKDLEKKENSADCETSQKRFPINILKEDPYILRYKALEEKLSLFQLGYVLYHIANHSNTAYENT

SEQ ID NO: 83 - protein, 1032 aa, uncultured Termite
MLYHIANHRGTDSVRSFLEYDDDKIKENTLTAKIAKETKKVIDAKKYRTFGEYLYKGKIEKFQQNIRKKVSNRKTPANKNKEFAVTRDVIIKETEKILASQKQYYTYILTDEYIKKIKDAISYQTEKLIPESGYCPYFKDEKRLPRSHKLNEYRRMYEALNNAKYFDPVLDENTGEILSYQEKEFSREEKKILFDEVLLKGMELTESGAKKLLYHLPDGCEVQLQGRDKTTQKIKGYALVDLEASPFWLRLSQQQQDEFLYDWNSLPLEKLKPKLTNYYSLTESEVDETFQEIKLPSNYASVGKKAMEILLTYIKDGCSYTEALEKAVSEGKLKVDKQTMIYDSLPYYGKILKESTQKLIGKAFSKQFADRNYKEPDTNKNEREFGKIANPVVHQTLNELRKLINEIITVFGKKPLEIGLETTRELKKSKKNREYLSKQQNKNEYARNRIYKEYIEPHLSQIKSRQENPSKYISKFELLEEQNFICPFCSEKITPDDIINSKVDVEHIFPIEESEDITKNNLVIAHNECNADKGKKSPFDAFGDKTSGKYRWNCILHNAQKNLPHKVWRFYQGSLEKFLENKPMSRRFGTDNSYISKIAARYLACLFNDPYHSEIFCIKSSLIAQLRIAWDLNSIMVPLVKNILSEKELEEFKISKNKKIRIDNRHHALDAIVIAYANRGYHNFLNRIHAKEYKINYREKSWLSKILLPPLNRDLEDFKISVKDSIEKANVSIKHDHNTNGSLVKATAYKVYYSGAGEYIITTSKNVEEISFKEKEDPKDTLYRALCKFECRDIDIKDEKLIKKLKYNSTLYKKVQNNLSKAKQELEQDNKKTEEEGKKSQKITEVRIYKKACSLVKGQYIQCGSRLKDKFFAVKEPTEIKTGLGYDTGDNLFLDLYYDKTGKLCGEIIRKVNFNRNKPNYQKEGYTLFERIYQSDILEVDTSEDRISLKNKTGSAPSDRTFIKVNTFTEVNAYFDGKRDKIQIFFGNLLKSSFKNDSFFISSMQKYNVRKVILTSLGIIKYRSQILKNKEV

SEQ ID NO: 84 - protein, 1032 aa, uncultured Termite
MKKRILGLDIGIASVGWALVEFDDEFQDNKKKGTIIKSGVRIFTRAETPKERESLAKPRREARSQRRRIRRRVERLNSIRELFVKNGVVEEWSVSKKNPNNIYITLNQIKTPWQLRMESLDRKLTNEQFAVVLTHLAKHRGYKSLRKDDKAGKVLEAISQNKKRLNDSDYRTLGEMFCKNESYKEHKRNKGGEYINSVARELIEEEVEKIFVKQREKGNNFADVNTEREYLKIAFSQKPAGSISKMVGFCTFENGEKRAPRDSYSAELFKVLCTINNTTFTDMKTGEIRSFSKEEIGKTLETVKNVKDVKYAKIRKDLGLEDSVKFSGVDYRENAKSKGEGEIFVSMKTYHEIKSKIEKLSKEKWDNLKGNTELLDSIVNIIANLKDDESIKKEFQKLKIDEDIIDVLLNFEFKKFINLSFKALRKIIPFQFQGQKYITASTSAGYSLKQEGIKNKLVPPAKENINVAVVARAFAQTRKVINAVIRKYGQFDQINIELATELKNSKFDRSKIEEGQKKFQSQKDKIFKEVQELRGGMTPSSSLLLKYRLWREQDERCVYSGRKISFEDLLDTGFLDIDHIIPYSKSMDDSFNNKVLCLAEENRNKKNDIPFNYYQRIDRDWNLLISIITSMKNMKIAKKSRLLKQELSDIEGFIERNINDTRYATRYIKDFLENNLEFKENEFIKVKVQARSGGLTSVLSYNWGMSKDREESYFHHAKDAIIVACSTQGMVQYISKISQQYENDKDKMKKIKDKTENCIPKPWDSFRADVEESIEGIFVSFAPRHKVTGSAHKETIYSKKHLEKERYVTVKKSLDKIKLSDLENIPCNENCGIIRVLKERLEKFKNDSLKAFADPVHMPTKCPNKKGPVIRSVKIKESNKTGIEVRKGLAERGEMVRVDVFIKDKKYYLVPIYVSDFKNKDLPNKAIAALKLENEWIMIDKTYSFKFSLFKDDLIKIKKKKEEIFGYFGGVHRSTGTIKIKSRHKPKEIDEGIGSRCLLDFRKFQVDVLGNYTEVKHEKRMPAYITRKDKKH

SEQ ID NO: 85 - protein, 1361 aa, Lactobacillus casei
MTKLGKPYGIGVDIGSNSIGFAAVDENSHLIRLKGKTVIGARLFEEGKAAADRRASRTTRRRLSRNRWRLSFLRDFFESHITPTGPNFFMRQKYSEISPKDKARYKYEKRLFNDRTDAEFYQQYPTMYHLRNRLLTDPSKADVREIYFAIHHILKSRGHFLTSGYAKDFNTNKVALNEIFPALQDAYAQVYPDLDITFDENKVNEFKTVLLNEKATPSDTQRALVNLLLAEDGDKDILKQQKQVLTEFAKAVVGLKTKLNVALGTEVDSSEATVWNFSLGQLDDKWAGIESAMTDEGTEILDQIRDLYRARLLNGIVPAGKTLSQAKVDDYAQHHEDLELFKDYLKQLEDDGTAKAIRQLYDRYIDGDDAKPFVREDFVKALTKEVTAHPNAKSPELLERLAQPDFMLKQRNKANGAIPVQMQQRELDQIIKNQSVYYDWLAAPNPVEKHRKSMPYQLDELLNFRIPYYVGPLVTAKEQKAAQGGVFAWMVRKDPDGNITPYNFDEKVDREASANTFIQRMKTTDTYLIGEDVLPKQSLLYQRYEVLNELNNVRVNNEKLSIEQKQQVIRELFERHNSVTIKQFAENLRAHGDYAHIPEIRGLADEKRFLSSLSTYRQLKSLLPDAIDDPAKQADIENIIAWSTVFEDAAIFKTKLKEINWLDSQTITKLSNIRYRGWGQFSHKFLNGLTLGNGHTIIQELFLSNNNLMQILTDETLQKKMTELNADKLKAANINDAIDDAYTSPSNKKALRQVLRVIEDIKRAADGQDPSWLYVETADGGGTPGKRTRARQHQLQEIYANAAHELIDSAVRGELEDKIADKADFNDRLVLYFMQGGRDIYTGTPLNIDQLSSYDIDHILPQSLIKDNSLDNRVLVHAIINREKNATFASTIYAQKMNATWRQWHEAGLISGRKLRNLQMRPDQIDKYASGFVARQLVETRQIIKLTEQIVAAQYPETKIIAVKAGLSHQLREELEFPKNRDVNHYHHAFDAFLAARIGTYLLKRFPNLQAFFTYGKFKKADVKKLRGFNFIRDITHAEDKIVVKDTGEVIWDKKRDVDELDRIYNFKRMLITHEVHFEKADLFKQTVYGAKDSKEAGGKKQLISKKKGYPVDIYGGYTQETGSYLSVVRLTKKAMYAVVKVSTRDAAKLAVAKSISEQKENETLNDIIDEKLSKISKNGKITHELFEVVLPRVGQKTLFKNSKYNLFLVNSDTYMHNYQELWMPREYQKMWKDISLSKYGDAQTEDQLDQIFGFIVSQVNSYFNLYDINQFRKKLNDAADKFATLPMRDTDDMQGKIATIGQLLIGLQANAARSDLRNLDIKTPLGLLQIPNGISLDSDTSVVYQSPTGLLEREVHLSDL

SEQ ID NO: 86 - protein, 1348 aa, Streptococcus equi
MKKPYTIALDIGTNSVGWVVVTDDYRVPTKKMKVLGNTERKTIKKNLIGALLFDSGDTAEGTRLKRTARRRYTRRKNRLRYLKEIFTEEMAKVDDGFFQRLEDSFYVLEDKEGNKHPIFANLADEVAYHKKYPTIYHLRKELVDNPQKADLRLIYLAVAHIIKFRGHFLIEGTLSSKNNNLQKSFDHLVDTYNLLFEEQRLLTEGINAKELLSAALSKSKRLENLISLIPGQKKTGIFGNIIALSLGLTPNFKANFGLSKDVKLQLAKDTYADDLDSLLAQIGDQYADLFLAAKNLSDAILLSDILTESDEITRAPLSASMVKRYREHHKDLVTLKTLIKDQLPEKYQEIFLDKTKNGYAGYIEGQVSQEEFYKYLKPILARLDGSEPLLLKIDREDFLRKQRTFDNGSIPHQIHLEELHAILRRQEVFYPFLKDNRKKIESLLTFRIPYYVGPLARGHSRFAWVKRKFDGAIRPWNFEEIVDEEASAQIFIEKMTKNDLYLPNEKVLPKHSLLYETFTVYNELTKVKYATEGMTRPQFLSADQKQAIVDLLFKTNRKVTVKQLKENYFKKIECWDSVEITGVEDSFNASLGTYHDLLKIIQDKDFLDNPDNQKIIEDIILTLTLFEDKKMISKRLDQYAHLFDKVVLNKLERHHYTGWGRLSGKLINGIRDKQSGKTILDFLKADGFANRNFMQLIHDSELSFIDEIAKAQVIGKTEYSKDLVGNLAGSPAIKKGISQTIKIVDELVKIMGYLPQQIVIEMARENQTTAQGIKNARQRMRKLEETAKKLGSNILKEHPVDNSQLQNDKRYLYYLQNGKDMYTGDDLDIDYLSSYDIDHIIPQSFIKNNSIDNKVLTSQGANRGKLDNVPSEAIVRKMKGYWQSLLRAGAISKQKFDNLTKAERGGLTQVDKAGFIQRQLVETRQITKHVAQILDSRFNTEFDDHNKRIRKVHIITLKSKLVSDFRKEFGLYKIRDINHYHHAHDAYLNAVVAKAILGKYPQLAPEFVYGDYPKYNSFKERQKATQKMLFYSNILKFFKDQESLHVNSDGEEIWNANKHLPIIKNVLSIPQVNIVKKTEVQTGGFYKESILSKGNSDKLIPRKNNWDTRKYGGFDSPTVAYSVLVIAKMEKGKAKVLKPVKEMVGITIMERTAFEENPVVFLEARGYREIQEHLIIKLPKYSLFELENGRRRLLASASELQKGNELFLPVDYMTFLYLAAHYHELTGSSEDVLRKKYFVDRHLHYFDDIIQMINDFAERHILASSNLEKINHTYHNNSDLPVNERAENIINVFTFVALGAPAAFKFFDATIDRKRYTSTKEVLNATLIHQSVTGLYETRIDLSQLGEN

SEQ ID NO: 87 - protein, 1341 aa, Ruminococcus lactaris
MGKGYYVGLDMGTGSVGWAVTDESYQILRRHGKAMWGVRLFESAKTAEERRMFRTGRRRLDRRGWRIEILQEIFAEEISRVDPGFFLRMKESKYYPEDKRDIQGNCPELPYTLFVDKTFTDKDFHKKYPTIYHLRKMLMETEDTPDMRLVYLALHHMMKHRGHFLLSGDISQVTEFKNTFNQFIENIRNEEMDFEIELDESAVQMIEETLKDKNLTRSAKKSKLVKGLNAKNVRDKAFLTLLSGGTVKLSDLFGMEELNEGERPKISFADNGYEEYAAVVEMELGELYYIVESAKAVYDWAILSDILGGSTSVSDAKVRAYEKHKADLKYLKAVVKEYFPKEVYNAVFVESSDKLNNYPAYIGMTKKNGKKVSLEGKRCSREEFMDFLKKNIVVKLPDEEAKMYLQSELEKDSFLPKQVNKDNGVIPYQVHKYELKKILDNLGDKIPFLKENAEKIEKLFSFRIPYYVGPLRTGNGENSKFAWAERKSTEKIYPWNFENVIDVEQSAENFIRRMTNKCTYLIGEDVLPKDSLLYSKFMVLNELNNLRLDGQKISVELKQKIYRDVFCRSRKVTQKKLKSYLIREGIAGKNVELTGIDGDFKGSLTAYHDFKEKLIDVELTQKEKEEIILNIVLFGDDKKLLKQRLKKKFPQLTEKQINTVTALSYKGWGRLSKKLLEEVTVPAPETGEVWNIITALWETNDNFMQLLSKEYQFSDRIEEFNEEKADPEVSYQTIEDLYVSPAVKRQIWQTLQIIQEIEKVMGEKPKRVFVEMAREKQENKRTESRKKTLSDLYTKCKKEEPEWIEALCTSLEKHEEHQLRSDKLYLYYTQKGRCMYSGEPIDLEDLWDNTKYDIDHIYPQSKTMDDSLKNRVLVKKEYNAKKSDTYPIAADIQKKMMPFWKSLLTGGFIPKEKYDRLVRNNPLDANELAGFIERQIVETRQSTKAVAEILKKILPDTEIVYVKAKTVSKFRQDFDFIKVRDMNDLHHAKDAYLNIVVGNVYFVKFTKNAAWFVKENPGRTYNLEKMFIWDVARDGEIAWKAGKSGSIVQVRAMMEKNHILVTRRSYEVKGGLFDQQILKKGKGQVPVKESDERLRDIGKYGGYNKAAGVYFMLVSSKDKKGKEQRTIEFVPIYLKDRVEKDMESARNYLMEERGLREPKILIKKIKIDTLFKVDGFYMWLSGRTSNQLIFKGANQLILSKEDMKTLKKVVKYIQRQKEDKNVKISMRDGITEEELLKLYETFLDKIRHSIYGARLSSQEKTLVNGKEKFIDLSVEAKCQVLYEILHLFQCQSGAANLKMIGGPASAGILVMNNNISKCKNISIVNQSPTGIYEKEIDLLRV

SEQ ID NO: 88 - protein, 1003 aa, Gluconacetobacter diazotrophicus
MIDESLTFGIDLGIGSCGWAVLRRPSAFGRKGVIEGMGSWCFDVPETSKERTPTNQIRRSNRLLRRVIRRRRNRMAAIRRLLHAAGLLPSTDSDALKRPGHDPWELRARGLDKPLKPVEFAVVLGHIAKRRGFKSAAKRKATNISSDDKKMLTALEATRERLGRYRTVGEMFARDPDFASRRRNREGKYDRTTARDDLEHEVHALFAAQRRLGQGFASPELEEAFTASAFHQRPMQDSERLVGFCPFERTEKRAAKLTPSFERFRLLARLLNLRITTPDGERPLTVDEIALVTRDLGKTAKLSIKRVRTLIGLEDNQRFTTIRPEDEDRDIVARTGGAMTGTATLRKALGEALWTDMQERPEQLDAIVQVLSFFEANETITEKLREIGLTLAVLDVLLTALDAGVFAKFKGAAHISTKAARNLLPHLEQGRRYDEACTMAGYDHAASRLSHHGQIVAKTQFNALVTEIGESIANPIARKALIEGLKQIWAMRNHWGLPGSIHVELARDVGNSIEKRREIEKHIEKNTALRARERREVHDLLDLEDVNGDTLLRYRLWKEQGGKCLYTGKAIHIRQIAATDNSVQVDHILPWSRFGDDSFNNKTLCLASANQQKKRSTPYEWLSGQTGDAWNAFVQRIETNKELRGFKKRNYLLKNAKEAEEKFRSRNLNDTRYAARLFAEAVKLLYAFGERQEKGGNRRVFTRPGALTAALRQAWGVESLKKQDGKRINDDRHHALDALTVAAVDEAEIQRLTKSFHEWEQQGLGRPLRRVEPPWESFRADVEATYPEVFVARPERRRARGEGHAATIRQVKERECTPIVFERKAVSSLKEADLERIKDGERNEAIVEAIRSWIATGRPADAPPRSPRGDIITKIRLATTIKAAVPVRGGTAGRGEMVRADVFSKPNRRGKDEWYLVPVYPHQIMNRKAWPKPPMRSIVANKDEDEWTEVGPEHQFRFSLYPRSNIEIIRPSGEVIEGYFVGLHRNTGALIPTPVGPDSYVIA

SEQ ID NO: 89 - protein, 1368 aa, Streptococcus pyogenes
MDKKYSIGLDIGTNSVGWAVITDDYKVPSKKFKVLGNTDRHSIKKNLIGALLFDSGETAEATRLKRTARRRYTRRKNRICYLQEIFSNEIAKVDDSFFHRLEESFLVEEDKKHERHPIFGNIVDEVAYHEKYPTIYHLRKKLADSTDKADLRLIYLALAHMIKFRGHFLIEGDLNPDNSDVDKLFIQLVQTYNQLFEENPINASRVDAKAILSARLSKSRRLENLIAQLPGEKRNGLFGNLIALSLGLTPNFKSNFDLAEDAKLQLSKDTYDDDLDNLLAQIGDQYADLFLAAKNLSDAILLSDILRVNTEITKAPLSASMIKRYDEHHQDLTLLKALVRQQLPEKYKEIFFDQSKNGYAGYIDGGASQEEFYKFIKPILEKMDGTEELLAKLNREDLLRKQRTFDNGSIPHQIHLGELHAILRRQEDFYPFLKDNREKIEKILTFRIPYYVGPLARGNSRFAWMTRKSEETITPWNFEEVVDKGASAQSFIERMTNFDKNLPNEKVLPKHSLLYEYFTVYNELTKVKYVTEGMRKPAFLSGEQKKAIVDLLFKTNRKVTVKQLKEDYFKKIECFDSVEISGVEDRFNASLGTYHDLLKIIKDKDFLDNEENEDILEDIVLTLTLFEDREMIEERLKTYAHLFDDKVMKQLKRRRYTGWGRLSRKLINGIRDKQSGKTILDFLKSDGFANRNFMQLIHDDSLTFKEDLQKAQVSGQGDSLHEHIANLAGSPAIKKGILQTVKVVDELVKVMGRHKPENIVIEMARENQTTQKGQKNSRERMKRIEEGIKELGSDILKEYPVETTQLQNEKLYLYYLQNGRDMYVDQELDINRLSDYDVDHIVPQSFLKDDSIDNKVLTRSDKNRGKSDNVPSEEVVKKMKNYWKQLLNAKLITQRKFDNLTKAERGGLSELDKAGFIKRQLVETRQITKHVAQILDSRMNTKYDENDKLIREVRVITLKSKLVSDFRKDFQFYKVREINNYHHAHDAYLNAVVGTALIKKYPKLESEFVYGDYKVYDIRKMIAKSEQEIGKATAKYFFYSNIMNFFKTEITLANGEIRKRPLIETNGETGEIVWDKGRDFATVRKVLSMPQVNIVKKTEVQTGGFSKESILPKRNSDKLIARKKDWDPKKYGGFDSPTVAYSVLVVAKVEKGKSKKLKSVKELVGITIMERSSFEKDPVDFLEAKGYKEVRKDLIIKLPKYSLFELENGRKRMLASAGELQKGNELALPSKYVNFLYLASHYEKLKGSPEDNEQKQLFVEQHKHYLDEIIEQISEFSKRVILADANLDKVLSAYNKHRDKPIREQAENIIHLFTLTNLGAPAAFKCFDTTIGRNRYKSIKEVLDATLIHQSITGLYETRIDLSQLGGD

SEQ ID NO: 90 - protein, 1504 aa, Bacteroides dorei
MKNIVGLDLGTNSIGWAVVNGSVNDDGSEQLVKIQASGSRIIPMDAAMIGDFNKGNSISQTAERTRLRGVRRLSERYLLRRERLHRILDILGFLPFHFAQDLDRHGKIVKGKEPKLAWRKNEAGQFEFIFQDSFKEMLEDFKLNYPNLITDDKKVPYDWTIYYLRKKGLTSKISKEELAWILLNFNQKRGYYQLRGEEEEENKDKLVEFYALKVVAVEDSGEKKGKDIWYNVHLENGWVYRRTSNMSLDWVGKTKEFIVTTDLEKDGTPKKDKEGNVKRSFRAPKEDDWSLVKKKTEADIDQTHKTVGAYIYDTLLGNPSQKIRGRLVRTIERKYYKEELKLILEKQKEFHLELQDRALYAACIEELYPINEAHRNNVGNRDFTYLFLEDILFYQRPLKSKKSLIDNCPYEENQGLDKETGEIKSFPVKCIAKSHPLFQEFRLWQFIINLRIYRKDLAQDVDVTNELLKTEEDYVALFDWLNGKKEIDQKAFLKYPVFGLKKEIENYRWNYVQDKPYPCNETRSLMLARLEKCDISIEFLTKENEEALWHILYSVEDKNEIVKALQKFADKHDLNASFVDVFQKFPPFKKEYGSYSAKAIKKLLPLMRMGKYWSENSIDKGTRERIDKIITGEYDEKIENRVREKAIHLADVSDFKGLPLWLVCYIVYGRHSEAKEIIQWKSPADIDSYLRSFKQHSLRNPIVEQIIIETLRVVRDIWKQVGNIDEIHVELGREMKNPADKRKKMTQQMSENENTNLRIKYLLTEFLNPEYEVENVRPYSPSQQDILRIYEEGVLNSVSDLPEEISDILKKFTETDLKKRPSRSEVLRYKLWLEQKYRSPYTGEVIPLGKLFTPAYEIEHVIPQSYYFDDSFSNKVICEAEVNKLKSNLLGHEFIVKHHGEIVELPFGKKVRIFTVDEYEQFVKDNYSRTRSKMKKLLMDDIPEEFVTRQLNDSRYISKVVKSLLSNIVREKGEEEAISKNVIPCTGGVTDRLKKDWGINEVWNKIILPRFQRLNELTGTNKFTTKNVGIQEIPTMPLELQKGFNKKRIDHRHHAMDAIIIACANRNIINYLNNKSATAKAELSRYDLQKMLCDKAKTDNNGNYKWVIRKPWASFTQDTYLALENIIVSFKQNLRVINKATNRFLHYNEEGKKIFVKQGKGDNWAIRKSMHKDTVFGEVNLRRIKTVALNEAMKNPQSIVVKDFKRKLLELWNLGFDAKRIKKYFEDNRETWSDINLSKIEVYYFSKDTKDRFFATRKPLDTSFDRKKIENNITDTGIQKILLRHLELKDNNPDIAFSPDGIDEMNRNIIQLNNGKYHQPIIKIRWYEQADKFAVGQTGNKSSKFVEAAKGTNLFFAVYESNILDKKTNTIIKKRNYATIPLNVAIERQKQGLPVAPEDENGNDPIFVLSPNDLVYLPTDDELANGIIAQPLDRGRIYKMVSSSGEQCFFIKHIVANVLVDKFEFSPLNKMERALTGEMIKMICIPIKVDRLGNVLESSSSYKK

SEQ ID NO: 91 - protein, 1426 aa, Capnocytophaga sputigena
MKNILGLDLGITSISFAHIVEDENKEKSEIKELGVRIVSLTTDEQSDFEKGKSITTNANRTLKHGARLNLDRYQQRRKYLIDLLQKANLITSSSILAENGKNTTHSTWQLRAKAVTERIEKEEFARVLLAINKKRGYKSSRKAKTEDEGQAIDGMAIAKRLYDENLTPGQLSLQLLQQNKKLLPDFYRSDLQREFDLVWNFQKQFYPDILTDSFYKELQGKGKDATSKAFSKRYHFDTAENKGSKESVRLQAYQWRAEAISKQLSKEEVAYVLTEINNNLNNASGYLGAISDRSKELYFNRQTVGQYLYAQLQENRHNSLKNKVFYRQDYLDEFERIWETQASFHKELTDELKKQIRDVVIFYQRKLKSQKGLISFCEFESKEIEIEKDGKTITKTIGARVVPKSSPLFQEFKIWQILNNVTCKRKGIRKKKSSAKSTELDLFNEPSQTIFSLDMECKQLLFDELNLKGDLKSDKVLKLLGYSPQEWEINYNQLEGNRTQKALYEAYLKIVEMEAHDVKDILQIKSAKDDWSLDESPLSASEIKEKVKDIFQALGICTKILYFDPLLPVKEFEKQDSYQLWHLLYSYESDDSTSGNETLYRILEKKYAFKREHARILANVALQDDYGSLSTKAIRKIYPNIKENQYSKACELAGYKHSKLSLTTEELEARELKNIIPLLKKNALRNPVVEKILNQMINVVNALIEKNSERDAEGKITKYFHFDEIRIELARELKKNAQKRYEMTQNINKAKLEHQKISEILQKKFGIKNPTKSDIIRYRLYQELEHNGYKELYTNAPIARDMLFSKNIEIEHIVPKARVFDDSFSNKTLTFHRINSNKGEYTAFDYITSLNSEEELNQYLTRVENAYKTKSISLTKYKNLLKKASEIGDGFINRDLRDTQYIAKKAKEILFQVTKNVLSTSGSITDRLREDWGLVDVMKELNMPKYQSLGLTEVEERKEGNKVTVIKNWTKRNDHRHHAMDALTVAFTKPSYIQYLNHLNARKDENNKNYSVILAIEEKETIKVPTNNGKNKRVFIEPIPNFRQVAKKHLEEIFISHKAKNKVVTKNVNKPAGTDKQQITLTPRGQLHKETIYGKYQYYVNKEEKVGVKFDERTITKVSNPLYREALLKRLQANDNDPKKAFTGKNALSKNPIYLDETKTKTLPEKVNLTYLEEDFSIRKDISPDNFKDLKSIEKVIDQGVKRILIKRLQDYDNDPKKAFVDLEKNPIWLNKEKGIAIKRVTISGVSNAQPLHIGKDHLGKTTLNKEGNEIPVDYVSTGNNHHVAIYRDKEGNLQEQIVSFFEAVVRTQQGLPIIDKTYKQEEGWQFLFTMKQNEMFVFPNATTGFNPAEIDLLDPKNKKLISPNLFRVQKIATKDYFFRHHLETNVETDNVLKNTTWKREGLSGLKDIVKVRINHLGDIVSIGEY

SEQ ID NO: 92 - protein, 1443 aa, Parabacteroides johnsonii
MIKLLYLEKLKQYTMKKILGLDLGTSSIGWALVNEAENSDEVSSIIKLGVRVNPLTVDEMQNFEKGKSITTNADRTLKRSMRRNLQRYKLRRDALIELLKKVGFITDKTILSEQGNRTTFETYRLRAKAAEEEISLKELARVLLMINKKRGYKSSRKAKGEEEGALIDGMEIAKKLYDEDLTPGQLCLQLLESGKKFFPDFYRSDLQEEFNKIWDFQKQFNLFSFCDVAKEEVKGKNKSQTWAILAKYFVETKKVNVWNEHEAQTENREEVYKLVGLKRTVKGEELKKENYRWRVQALTEQLDLEKIAVVLQEINGQISASSGYLGAISDRSKVLYFNRQTVGQYQMAELNKNPNMSLRNMVFYRQDYLDEFNVIWEKQAEFHKELTPELKKEIRDIIIFYQRRLKSQKGLISFCEFENREVVVEKEGKKQTKIIGCKVIPRSHPLFQEFKIWQTLNNIEVFVGEKKGKRKKSNVSSDLFGDTEDALITEGRRFLYQEEKKILAKELSIKKGLTKAEILRLLFENPQELDINFKQIDGNQTGFALFSAYSNMIEKYGYEPLDFKKPAEDLISQLKTVFTDLGWNTDLLFIDLDKENKEWEKQPYFRLWHLLYSFEGDNTPTGNGKLIEKIMQLCGIEKEYAIELANVSLQDDYGSLSAKAIKKILLYLKEGNQYDMACEYAGYRHSKSSLTKEEIENKVLKDKLEILPKNSLRNPVVEKILNQMVNVINTVMEVYGRPDEIRVELARELKKSAKEREELTKAVAKNTREHEEIRKVLQSEFGMINVSRNDIIRYKLYEELKDNGYKTLYSNQYIPREKLFSKEIDIEHIIPQSRLFDDSLSNKTLEYKSINIEKGNKTAYDFVKEKYGEEGLQQYLNRCENLCKDKKAKLRKLKMELNEIPDGFIDRDLRNTQYIAKKALSMLTEICRRVVATTGSITDKLREDWQLVDVMKELNLPKYEALGLVEVYEDKDGRKIKRIKDWTKRNDHRHHAMDALTVAFTKDVFIQYFNNKNAAWESDSKEHTNIVGIKTRYFESGKAVPPIPLGQFRVEAKCHLENLLVSIKAKNKVVTTNVNCIKKKGGTYKNTQQTPRGQLHLETIYGSHNQYVTKIEKVNASFDAVKIATVSKQDYRNALLKRLEVFGNDPKKAFTGKNSLEKNPIYLDRAQTIQVPDKVQTVELETAYTIRKPVDPTLNVDKVVDKKIRLILEQRLKEYGGDAKKAFVNLDENPIWLNEEKGISIKRVTIRGISKAQALHDKKDKDGNFILDETGKRIPVDFVNTGNNHHVAIYRKPVLDKKGQVIFDDEGNPMYELDEDVVPFFEAVTRANLGIPIIDKDYKKSEGWQFLFSMKQNEYFVFPNEKTGFNPKEVDLLDPDNYAMISPNLFRVQKIGLNDYTFRHHLETTIQNDLKFITWIRCGKSGIKDIVKVRINHIGQIVSVGEY

SEQ ID NO: 93 - protein, 984 aa, Campylobacter jejuni
MARILAFDIGISSIGWAFSENDELKDCGVRIFTKVENPKTGESLALPRRLARSARKRLARRKARLNHLKHLIANEFKLNYEDYQSFDESLAKAYKGSLISPYELRFRALNELLSKQDFARVILHIAKRRGYDDIKNSDDKEKGAILKAIKQNEEKLANYQSVGEYLYKEYFQKFKENSKEFTNVRNKKESYERCIAQSFLKDELKLIFKKQREFGFSFSKKFEEEVLSVAFYKRALKDFSHLVGNCSFFTDEKRAPKNSPLAFMFVALTRIINLLNNLKNTEGILYTKDDLNALLNEVLKNGTLTYKQTKKLLGLSDDYEFKGEKGTYFIEFKKYKEFIKALGEHNLSQDDLNEIAKDITLIKDEIKLKKALAKYDLNQNQIDSLSKLEFKDHLNISFKALKLVTPLMLEGKKYDEACNELNLKVAINEDKKDFLPAFNETYYKDEVTNPVVLRAIKEYRKVLNALLKKYGKVHKINIELAREVGKNHSQRAKIEKEQNENYKAKKDAELECEKLGLKINSKNILKLRLFKEQKEFCAYSGEKIKISDLQDEKMLEIDHIYPYSRSFDDSYMNKVLVFTKQNQEKLNQTPFEAFGNDSAKWQKIEVLAKNLPTKKQKRILDKNYKDKEQKNFKDRNLNDTRYIARLVLNYTKDYLDFLPLSDDENTKLNDTQKGSKVHVEAKSGMLTSALRHTWGFSAKDRNNHLHHAIDAVIIAYANNSIVKAFSDFKKEQESNSAELYAKKISELDYKNKRKFFEPFSGFRQKVLDKIDEIFVSKPERKKPSGALHEETFRKEEEFYQSYGGKEGVLKALELGKIRKVNGKIVKNGDMFRVDIFKHKKTNKFYAVPIYTMDFALKVLPNKAVARSKKGEIKDWILMDENYEFCFSLYKDSLILIQTKDMQEPEFVYYNAFTSSTVSLIVSKHDNKFETLSKNQKILFKNANEKEVIAKSIGIQNLKVFEKYIVSALGEVTKAEFRQREDFKK

SEQ ID NO: 94 - protein, 1082 aa, Neisseria meningitidis
MAAFKPNPINYILGLDIGIASVGWAMVEIDEDENPICLIDLGVRVFERAEVPKTGDSLAMARRLARSVRRLTRRRAHRLLRARRLLKREGVLQAADFDENGLIKSLPNTPWQLRAAALDRKLTPLEWSAVLLHLIKHRGYLSQRKNEGETADKELGALLKGVADNAHALQTGDFRTPAELALNKFEKESGHIRNQRGDYSHTFSRKDLQAELILLFEKQKEFGNPHVSGGLKEGIETLLMTQRPALSGDAVQKMLGHCTFEPAEPKAAKNTYTAERFIWLTKLNNLRILEQGSERPLTDTERATLMDEPYRKSKLTYAQARKLLGLEDTAFFKGLRYGKDNAEASTLMEMKAYHAISRALEKEGLKDKKSPLNLSPELQDEIGTAFSLFKTDEDITGRLKDRIQPEILEALLKHISFDKFVQISLKALRRIVPLMEQGKRYDEACAEIYGDHYGKKNTEEKIYLPPIPADEIRNPVVLRALSQARKVINGVVRRYGSPARIHIETAREVGKSFKDRKEIEKRQEENRKDREKAAAKFREYFPNFVGEPKSKDILKLRLYEQQHGKCLYSGKEINLGRLNEKGYVEIDHALPFSRTWDDSFNNKVLVLGSENQNKGNQTPYEYFNGKDNSREWQEFKARVETSRFPRSKKQRILLQKFDEDGFKERNLNDTRYVNRFLCQFVADRMRLTGKGKKRVFASNGQITNLLRGFWGLRKVRAENDRHHALDAVVVACSTVAMQQKITRFVRYKEMNAFDGKTIDKETGEVLHQKTHFPQPWEFFAQEVMIRVFGKPDGKPEFEEADTPEKLRTLLAEKLSSRPEAVHEYVTPLFVSRAPNRKMSGQGHMETVKSAKRLDEGVSVLRVPLTQLKLKDLEKMVNREREPKLYEALKARLEAHKDDPAKAFAEPFYKYDKAGNRTQQVKAVRVEQVQKTGVWVRNHNGIADNATMVRVDVFEKGDKYYLVPIYSWQVAKGILPDRAVVQGKDEEDWQLIDDSFNFKFSLHPNDLVEVITKKARMFGYFASCHRGTGNINIRIHDLDHKIGKNGILEGIGVKTALSFQKYQIDELGKEIRPCRLKKRPPVR

SEQ ID NO: 95 - protein, 1021 aa, Clostridium cellulolyticum
MKYTLGLDVGIASVGWAVIDKDNNKIIDLGVRCFDKAEESKTGESLATARRIARGMRRRISRRSQRLRLVKKLFVQYEIIKDSSEFNRIFDTSRDGWKDPWELRYNALSRILKPYELVQVLTHITKRRGFKSNRKEDLSTTKEGVVITSIKNNSEMLRTKNYRTIGEMIFMETPENSNKRNKVDEYIHTIAREDLLNEIKYIFSIQRKLGSPFVTEKLEHDFLNIWEFQRPFASGDSILSKVGKCTLLKEELRAPTSCYTSEYFGLLQSINNLVLVEDNNTLTLNNDQRAKIIEYAHFKNEIKYSEIRKLLDIEPEILFKAHNLTHKNPSGNNESKKFYEMKSYHKLKSTLPTDIWGKLHSNKESLDNLFYCLTVYKNDNEIKDYLQANNLDYLIEYIAKLPTFNKFKHLSLVAMKRIIPFMEKGYKYSDACNMAELDFTGSSKLEKCNKLTVEPIIENVTNPVVIRALTQARKVINAIIQKYGLPYMVNIELAREAGMTRQDRDNLKKEHENNRKAREKISDLIRQNGRVASGLDILKWRLWEDQGGRCAYSGKPIPVCDLLNDSLTQIDHIYPYSRSMDDSYMNKVLVLTDENQNKRSYTPYEVWGSTEKWEDFEARIYSMHLPQSKEKRLLNRNFITKDLDSFISRNLNDTRYISRFLKNYIESYLQFSNDSPKSCVVCVNGQCTAQLRSRWGLNKNREESDLHHALDAAVIACADRKIIKEITNYYNERENHNYKVKYPLPWHSFRQDLMETLAGVFISRAPRRKITGPAHDETIRSPKHFNKGLTSVKIPLTTVTLEKLETMVKNTKGGISDKAVYNVLKNRLIEHNNKPLKAFAEKIYKPLKNGTNGAIIRSIRVETPSYTGVFRNEGKGISDNSLMVRVDVFKKKDKYYLVPIYVAHMIKKELPSKAIVPLKPESQWELIDSTHEFLFSLYQNDYLVIKTKKGITEGYYRSCHRGTGSLSLMPHFANNKNVKIDIGVRTAISIEKYNVDILGNKSIVKGEPRRGMEKYNSFKSN

SEQ ID NO: 96 - protein, 1131 aa, Acidovorax ebreus
MAQHVFGLDIGIASVGWAILGEQRIIDLGVRCFDKAETAKEGDPLNLTRRQARLLRRRLYRRAWRLTQLSRLLKRKGLIADAKLFAKAPSYGDSAWELRRQGLDRLLTPLEWARVIYHQCKHRGFHWTSKAEEAKADSDAEGGRVKQGLAHTKALMQAKNYRSAAEMVLAEFPDAQRNKRGQYDKALSRVLLGEELALLFATQRRLGNPHASDFFEKLILGDGDRKSGLFWQQKPALSGADLLKMLGKCTFEKGEYRAPKASFSVERHVWLTRLNNLRIVVDGRSRPLNEAERQAALLLPYQTETSKYKTLKNAFIKAGLWGDGVRFGGLAYPSQAQIDAEKTKDPEDQFLVKLPAWHELRKAFKAAGHEALWQQISTPALDGDPTLLDQIATVLSVYKDGAEVVQQLRQLALPEPAASIAVLEKISFDKFSSLSLKALRRIVPLMQSGLRYDEAVAQIPEYGHHSQRIEPGAAKHLYLPPFYEAQRKYAGKGDHIGSMQFRDDADIPRNPVVLRALNQARKVVNALIREYGSPIAVNIEMARDLSRPLDERNKVKRAQEEFRDRNDRARSEFERDFGYKPKAAAFEKWMLYREQLGQCAYSQQPLDIQRVLDDHNYAQVDHALPYSRSYDDSKNNKVLVLTHENQNKGNRTAFEYLTSFPDGEDGERWRTFVAWVQGNKAYRMAKRNRLLRKNYGVDESKGFIDRNLNDTRYICKFFKNYVEEHLQLAARADGDTARRCVVVNGQLTAFLRARWGLTKVRGDSDRHHALDAAVVAACTHGMVKALADYSRRKEISFLQEGFPDPETGEILNPAAFDRARQHFPEPWTHFAHELKARLFTDDLAALREDMQRLGSYTTEDLGRLRTLFVSRAPQRRSGGAVHKETIYAQPESLKQQGGVIEKILLTSLKLQDFDKLLNPESNDHFVEPHRNERLYAAIRQRLEQFGGRADKAFGPDNLFHKPDKNNQPTGPVVRSIKLVRGKQTGIPIRGGLAKNDSMLRVDIFTKAGKFHLVPVYVHHRVTGLPNRAIVAFKDEDEWTLIDESFAFLFSVYPNDYVKVTLKKEQQSGYYSGADRSTGAMNLWAHDRAASVGKDGLIRGIGVKTALSVEKFNVDVLGRIYLAPPETRSGLA

SEQ ID NO: 97 - protein, 1122 aa, Streptococcus suis
MSNGKILGLDIGIASVGVGVIDAQTGEIIHASSRIFPSANAANNAERRTFRGSRRLIRRKKHRIKRLDDLFNDFHINLDGEMSTDNPYVLRVKGLSQKLTVEELYISIKNIMKRRGISYLDDAESDNEAGRSDYAKAIERNRQLLTSKTPGEIQLERLEKYGQLRGNFTIIDEEGQSQQIINVFSTSDYVKEVEKILDCQKMYHKFISDEFCDKLIELLREKRKYYVGPGNEKSRTDYGIYRTDGTTLENLFGILIGKCTFYPDQYRSSRASYTAQEFNFLNDLNNLTVPTETKKLSQEQKEFLVNYAKETSVLGAGKILQQIAKLADCKVEDIRGYRLDNKDKPELHTFETYRAMKGLVPLVDIGVLSREQLDILADILTLNTDFEGIREALKKQLPNVFDEKQVKGLASFRKSKSQLFAKGWHNLSQKIMLEVIPELYATSDEQMTILTRLGKFEKSSVAEYPSSINVDEITDEIYNPVVAKSIRQTIKIINASIKKWGEFDQIVIEMPRDRNEDEEKKRIADGQKANAKEKADSILRAAELYCAGKVLPDYVYNGHNQLATKIRLWYQQGERCIYTGQPISIHDLIHNQNQYEIDHILPLSLTFDDSLSNKVLVLATANQEKAQRTPYNYLKSATSAWSYREFKDYVTKRKGIGKKKCEYLTFEEDINGFEVRSKFIQRNLVDTRYASKVILNALQDYFKISGIQTKVSVVRGQFTSQLRHKWGIEKTRETYHHHAVDALIIAASSQLRLWKKQESPLVVDYQEGRQVDLETGEILELTDEQYKELVYQPPYQGFVNTISSSAFDNEILFSYQVDSKVNRKISDATIYATRNAQLGKDKTEGIYVLGKIKDIYTQAGYEAFLKRYTKDKTSFLMYHKDLDTWEKVIEIILRDYREYDEKGKEIGNPFERYRRENGYVKKYSRKGNGTAIKSLKYYDNKLGNHIDITPENSRNAVVLQSLKPWRTDVYFNKETGKYEFLGIKYSDLSFEKGTGEYGISQEKYDSIKIAEGVAKKSIFKFTLYKQDLLFIKDIENNFGKLLRFTSKNDTSKHYVELKPYDKNKFGTEEPLLPVLGNVAKSGQCIKGLNKSNISIYKVRTDILGYRHFIKQEGEHPQLKFKK

SEQ ID NO: 98 - protein, 1509 aa, Bacteroides coprophilus
MKKTLGLDLGTNSIGWAVINSNIDSEGKEKLVGISSCGSRIIPMDATTLGDFGKGNTKSPVAERTRLRGIRRLLERSLLRRERLHRVLSVMGFLPEHYASQLDRYGKFLPETEPKLAWYKDDSGRYQFLFQKSFHEMLEDFRQHQPELVAGEKKIPYDWTIYYLRKKALSQEITKEELAWILLNFNQKRGYYQLRGEEEQEENNKSVEYHALKVVSVEDSGERKGKDIWYNVTLENGWVYRRASNIPLDWTGKVKEFVVTTELDDAGNPKKDKEGNVKRSFRAPKEDDWGLLKTRTQAQIDESGKTVGTYIYESLLCMPNQKIRGKLVRTIERKYYKDELRQILVKQSEFHAALQDHNLLLSCIEELYPNNEAHRRLLSASSFIYFLIEDILFYQRPLKSQKGLIDNCPYESHIYKDKKDGSLHHVPLKCVSKSHPLFQEFRLWQFLSNLRIYQRERMMDGSLKLDVDVTREFLPSEEDYVKLFDWLNERKEISQKFLLAYKPFGLKKNEQANYRWNYVEDKSYPCNETRAEIKSRLSKAGVPEEFLTEEKEEALWHILYSISDKKELTKALGTFAAKNCLNESFVEVFAKIPPFESNYAAYSLKAIRKLLALMRMGKYWNEQAIDRQTRDRIEKILTGEYDETIRSRVREKAMLLTDISSFRGLPLWLACYIVYDRHSESKELVKWETPADIDHFLSKFKQNSLRNPIVEQVITESLRTVRDIWKQEGKIDEIHVELGREMKNPAKERARITAQVQENENTNLRIKALLAEFMNPEFEIENVHPYSPGQQEILRIYEDGVLSGIAEKDLPDDITAILKKFRENDVKKRPTTSEVLRYKLWLEQRYRSPYTGRVIPLGKLFTPAYEIEHVIPQSRYFDDSISNKVICESAVNKLKDNCLGYEFIKKHSGEMVELGNGETVPVFSVEEYERFVKESYFGNSKKMKKLLLEDIPDSFIERQLNDSRYISRVVTSLLSNLVCEEGEQDGLSKNVIVCTGGITDRLKKDWGVQEVWNRIILPRFLRLNEITGRTDFTSTSVNGHLLPALPLYLQKGFNKKRIDHRHHAMDAIVIACANRNIVNYLNNSSARKNSEISRYDLQRLLCEKVKTDANGNYKWILRKPWETFTQDVYAALTNIVVSFKQNLRVINRTTNYYQHYNEAGEKRMIPQTKGDRWAIRKPMHKDTVYGEVNLRKEKTLPLRDVVKNPSIVVDKSLKNKLYELLKSQYDLKAIAKYFETHQDVWADVNLKKIKVYYFTKETNERFFATRKSLDPSFDQKKIEEEVTDTGVQKILLHHLQQNNNDPDMAFSPDGIDRMNQNMTILNDGKWHQPIYKVRTYEKADKFAVGESGNKAKKFVEAAKGTNLFFAVYESVQEDEAIGKQVCKRTFATIPLNEVIKRKKQGLPAAPEDLNGNLPKFVLSPNDLVYLPTEEERNSSRIIQPLDRERIYKMVSSSGSQCFFIKVFVANSIWDKNEYSSLNKMERAITNEMIKEICVPIKIDRLGNVSLIQI

SEQ ID NO: 99 - protein, 1219 aa, Bacteroides cellulosilyticus
MKEEVRGKNRSQTWAILAKFFVWSEKESVWNEKEARTEERVKEYKLVGLKRDTKGNELKLENYRWRVQALSEQLNPEIVAIVLQEINGQISASSGYLGAISDRSKQLYFNRQTVGQYLMSELEKDPNVSLRNRVFYRQDYLDEFDRIWEKQAEFHEELTVELKKEIRDIIIFYQRRLKSQKGLISFCEFEKREVVVEEDGRKKNKTVGCRVIPRSHPLFQEFKIWQTLNDIEVFAWDKQSKRKKADKSSILFDNSEDALLVEGKRFLYQEEKELLAKELFVKESMKKAEVLKLLFENYQELDLNFKQIDGNHTGFALFSAYSKMIEKYGYEPVDFKRSADEIIEKLETIFTNLGWNTELLSIDLSKEDKELERQSYFRLWHLLYSFEGDNTPTGNGKLLEKIMQLCDVEKEYAVELANVSFQEDYGSLSAKAIKKILPYLKEGNQYDVACDYAGYRHSRSSLTKDEIENKILKDKLEILPKNSLRNPVVEKILNQMVNLINTLIDTYGKPDEIRVELARELKKNAKEREELTKSIARNTREHDEIRQLLRTEFGMMNVSRNDIIRYKLYEELKDNGYKTLYSNEYIPREKIFSKEIDIEHVIPQARLFDDSLSNKTLEYRAINIEKGNKTAYDFVKEKYGNDGLEKFLNRCETLFKDKRTKLRKLKMEEKDIPEGFIDRDLRNTQYISKKAFAMLNEISRRVVATTGSITDKLREDWQLVDLMKELNLPKYEKLGMVEMFEDKDGRKIKKITDWTKRNDHRHHAVDALTVAFTKDVFIQFYNNKNAAWMPASKEHANITGIKARYFENGKALAPMPLAQFRAEAKRHLENLLVSIKAKNKVITSNVNRTKNKNGENRKLQQTPRGQLHLETVYGSHRQYATKIEKVNAAFDVTKIATVSKLAYRNALLKRLEAFGNDPKKAFTGKNTLEKNPLYLDENQTEMVPEKVQTVEFETVYTIRKPIDPNLSIDKVVDVKIRSVLEKRLKEYGGDAKKAFVNLDENPIWLNEAKGISIKRVSIRGISNAQSLHEKKDKDGNLILGKEGRKIPVDFVNTGNNHHVAIYKKPVLDKVGQVVLDEEGNPKYELDEVVVSFFDAVTRANLGQPIIDKDYRRSEGWQFLFSMKQNEYFVFPNDKTGFNPKEVDLLNPENYALISPNLFRVQKFAYKNYVFRHHLETTIKDTSSTLKGITWTDFRSSKGLDKIVKVRVDHIGQIVSIGEY

SEQ ID NO: 100 - protein, 1329 aa, Catenibacterium mitsuokai
IVDYCIGLDLGTGSVGWAVVDMNHRLMKRNGKHLWGSRLFSNAETAANRRASRSIRRRYNKRRERIRLLRAILQDMVLEKDPTFFIRLEHTSFLDEEDKAKYLGTDYKDNYNLFIDEDFNDYTYYHKYPTIYHLRKALCESTEKADPRLIYLALHHIVKYRGNFLYEGQKFNMDASNIEDKLSDIFTQFTSFNNIPYEDDEKKNLEILEILKKPLSKKAKVDEVMTLIAPEKDYKSAFKELVTGIAGNKMNVTKMILCEPIKQGDSEIKLKFSDSNYDDQFSEVEKDLGEYVEFVDALHNVYSWVELQTIMGATHTDNASISEAMVSRYNKHHDDLKLLKDCIKNNVPNKYFDMFRNDSEKSKGYYNYINRPSKAPVDEFYKYVKKCIEKVDTPEAKQILNDIELENFLLKQNSRTNGSVPYQMQLDEMIKIIDNQAEYYPILKEKREQLLSILTFRIPYYFGPLNETSEHAWIKRLEGKENQRILPWNYQDIVDVDATAEGFIKRMRSYCTYFPDEEVLPKNSLIVSKYEVYNELNKIRVDDKLLEVDVKNDIYNELFMKNKTVTEKKLKNWLVNNQCCSKDAEIKGFQKENQFSTSLTPWIDFTNIFGKIDQSNFDLIENIIYDLTVFEDKKIMKRRLKKKYALPDDKVKQILKLKYKDWSRLSKKLLDGIVADNRFGSSVTVLDVLEMSRLNLMEIINDKDLGYAQMIEEATSCPEDGKFTYEEVERLAGSPALKRGIWQSLQIVEEITKVMKCRPKYIYIEFERSEEAKERTESKIKKLENVYKDLDEQTKKEYKSVLEELKGFDNTKKISSDSLFLYFTQLGKCMYSGKKLDIDSLDKYQIDHIVPQSLVKDDSFDNRVLVVPSENQRKLDDLVVPFDIRDKMYRFWKLLFDHELISPKKFYSLIKTEYTERDEERFINRQLVETRQITKNVTQIIEDHYSTTKVAAIRANLSHEFRVKNHIYKNRDINDYHHAHDAYIVALIGGFMRDRYPNMHDSKAVYSEYMKMFRKNKNDQKRWKDGFVINSMNYPYEVDGKLIWNPDLINEIKKCFYYKDCYCTTKLDQKSGQLFNLTVLSNDAHADKGVTKAVVPVNKNRSDVHKYGGFSGLQYTIVAIEGQKKKGKKTELVKKISGVPLHLKAASINEKINYIEEKEGLSDVRIIKDNIPVNQMIEMDGGEYLLTSPTEYVNARQLVLNEKQCALIADIYNAIYKQDYDNLDDILMIQLYIELTNKMKVLYPAYRGIAEKFESMNENYVVISKEEKANIIKQMLIVMHRGPQNGNIVYDDFKISDRIGRLKTKNHNLNNIVFISQSPTGIYTKKYKL

SEQ ID NO: 101 - protein, 1152 aa, Roseburia inulinivorans
MNAEHGKEGLLIMEENFQYRIGLDIGITSVGWAVLQNNSQDEPVRITDLGVRIFDVAENPKNGDALAAPRRDARTTRRRLRRRRHRLERIKFLLQENGLIEMDSFMERYYKGNLPDVYQLRYEGLDRKLKDEELAQVLIHIAKHRGFRSTRKAETKEKEGGAVLKATTENQKIMQEKGYRTVGEMLYLDEAFHTECLWNEKGYVLTPRNRPDDYKHTILRSMLVEEVHAIFAAQRAHGNQKATEGLEEAYVEIMTSQRSFDMGPGLQPDGKPSPYAMEGFGDRVGKCTFEKDEYRAPKATYTAELFVALQKINHTKLIDEFGTGRFFSEEERKTIIGLLLSSKELKYGTIRKKLNIDPSLKFNSLNYSAKKEGETEEERVLDTEKAKFASMFWTYEYSKCLKDRTEEMPVGEKADLFDRIGEILTAYKNDDSRSSRLKELGLSGEEIDGLLDLSPAKYQRVSLKAMRKMQPYLEDGLIYDKACEAAGYDFRALNDGNKKHLLKGEEINAIVNDITNPVVKRSVSQTIKVINAIIQKYGSPQAVNIELAREMSKNFQDRTNLEKEMKKRQQENERAKQQIIELGKQNPTGQDILKYRLWNDQGGYCLYSGKKIPLEELFDGGYDIDHILPYSITFDDSYRNKVLVTAQENRQKGNRTPYEYFGADEKRWEDYEASVRLLVRDYKKQQKLLKKNFTEEERKEFKERNLNDTKYITRVVYNMIRQNLELEPFNHPEKKKQVWAVNGAVTSYLRKRWGLMQKDRSTDRHHAMDAVVIACCTDGMIHKISRYMQGRELAYSRNFKFPDEETGEILNRDNFTREQWDEKFGVKVPLPWNSFRDELDIRLLNEDPKNFLLTHADVQRELDYPGWMYGEEESPIEEGRYINYIRPLFVSRMPNHKVTGSAHDATIRSARDYETRGVVITKVPLTDLKLNKDNEIEGYYDKDSDRLLYQALVRQLLLHGNDGKKAFAEDFHKPKADGTEGPVVRKVKIEKKQTSGVMVRGGTGIAANGEMVRIDVFRENGKYYFVPVYTADVVRKVLPNRAATHTKPYSEWRVMDDANFVFSLYSRDLIHVKSKKDIKTNLVNGGLLLQKEIFAYYTGADIATASIAGFANDSNFKFRGLGIQSLEIFEKCQVDILGNISVVRHENRQEFH

SEQ ID NO: 102 - protein, 686 aa, Coprococcus comes
MKKQDSPKNNMGYTAYNLNVLGYEEFAKRVELLFKDTDAVKRLNDSHMQMAEGFDLNALPGSPALRRGVSQAIKVLDDIVSVAGKAPDRIYLKVTRTASNSRKGKRTAKRSDKIKQALKALDADAAADLGAAKLLRELGMFDEKEINERIYLYFHQAGKCLYTGKPIDITRIASNDYYVDHVVPLAYRKDESLDNKVLVYAEASRYKSETLLVSPAVQRKMLPFWRMLRNAGLMSERKLNALIRTEISEGMLKSIIGRQFTENSWEAKLFTAAIAAKYPGTVVIPVKAGVIGAVRSRIGIPKSLKANQFYHAHDALLAAEVGRYMELAKPAFVHNRVKYEQYMRKIKLVNEENKKAPKSQLDFFAGGFFFDRVDKDTGEVYWNKDEEVERIYRACGWKNLRVTYAAFEDGGAFWKQTIYSPREKSKLIATKSDRPAEIYGGYSSQTFANFFVYEVMKKKVKQLRFGAVPAAIASKSDPDTYNAMLEMYARGLAKTAKEKFVRIVRARVLKNTMIELYGERFRIAGEKQVYPVRQMPLAIDEVYLLKGVETIAAAGNAGASAKIDFEKAAESLVGFWDLLLEKLPVNYPKLTVQLKLGLLKHPKDILAATSESEFPAIVYKIAEAEIQVMEQASGLRNMSDTKILGGNTFGGSLVFTFNKVLNDPKSKACFIDTTPAGLYEVKTKIW

SEQ ID NO: 103 - protein, 1105 aa, Actinomyces coleocanis
MDNKNYRIGIDVGLNSIGFCAVEVDQHDTPLGFLNLSVYRHDAGIDPNGKKTNTTRLAMSGVARRTRRLFRKRKRRLAALDRFIEAQGWTLPDHADYKDPYTPWLVRAELAQTPIRDENDLHEKLAIAVRHIARHRGWRSPWVPVRSLHVEQPPSDQYLALKERVEAKTLLQMPEGATPAEMVVALDLSVDVNLRPKNREKTDTRPENKKPGFLGGKLMQSDNANELRKIAKIQGLDDALLRELIELVFAADSPKGASGELVGYDVLPGQHGKRRAEKAHPAFQRYRIASIVSNLRIRHLGSGADERLDVETQKRVFEYLLNAKPTADITWSDVAEEIGVERNLLMGTATQTADGERASAKPPVDVTNVAFATCKIKPLKEWWLNADYEARCVMVSALSHAEKLTEGTAAEVEVAEFLQNLSDEDNEKLDSFSLPIGRAAYSVDSLERLTKRMIENGEDLFEARVNEFGVSEDWRPPAEPIGARVGNPAVDRVLKAVNRYLMAAEAEWGAPLSVNIEHVREGFISKRQAVEIDRENQKRYQRNQAVRSQIADHINATSGVRGSDVTRYLAIQRQNGECLYCGTAITFVNSEMDHIVPRAGLGSTNTRDNLVATCERCNKSKSNKPFAVWAAECGIPGVSVAEALKRVDFWIADGFASSKEHRELQKGVKDRLKRKVSDPEIDNRSMESVAWMARELAHRVQYYFDEKHTGTKVRVFRGSLTSAARKASGFESRVNFIGGNGKTRLDRRHHAMDAATVAMLRNSVAKTLVLRGNIRASERAIGAAETWKSFRGENVADRQIFESWSENMRVLVEKFNLALYNDEVSIFSSLRLQLGNGKAHDDTITKLQMHKVGDAWSLTEIDRASTPALWCALTRQPDFTWKDGLPANEDRTIIVNGTHYGPLDKVGIFGKAAASLLVRGGSVDIGSAIHHARIYRIAGKKPTYGMVRVFAPDLLRYRNEDLFNVELPPQSVSMRYAEPKVREAIREGKAEYLGWLVVGDELLLDLSSETSGQIAELQQDFPGTTHWTVAGFFSPSRLRLRPVYLAQEGLGEDVSEGSKSIIAGQGWRPAVNKVFGSAMPEVIRRDGLGRKRRFSYSGLPVSWQG

SEQ ID NO: 104 - protein, 1361 aa, Anaerococcus tetradius
MGNYYLGLDIGTNSVGWAVTDENYNIERFKKKNMWGIRLFDEAKTAESRRIHRQARRMRQRKIQRLNLLMELFDVEISKVDESFFIRKKESDLHYEDKSQDSRYALFNDKEFNDKDYHNKYPTIFHLIMDLIENDEKKDIRLLYLACHYLIKNRGHFIFEGQKFDVNSSLNNNINKLKSHLDQFYNICLDFDNDKLIEILVNQNLNISEKSKKIKELLRKTNLEVGIANLIAGGSIKLSNMFDDDELKNLDYNSLSFKNSNFDEGRELFEEVLEDRFELVEILKDIHDASVLETMLSSASISPDGGKYISSSMINSYNKHKRDLKLLKKIIKKYKKSEYDNIFRDENIKNNYLSYTRTGINKNKKVQAEDNTDSDGFYKYIVKILKDIKENDSDEDIKYILSEIDKKNFVPKQRTKENSVIPYQLREIELRKIIDNQSKYHKFLNEVDEKGISVKEKIISLLTFRIPYYIGPLNPSYNEEKNFTTSWVKRLAKGKVTPWNFEDMVDIDASREAFIENKLNKCSFLLDETVLPKDSLLYQEYMVLNELNNLKINGQSINTDLKKSIYEELFKKYKKVTRKRLISYIKEKENMSGDIVITGIDGDFKQGLKSYIAFKDIIGEKIDDDIYRKEVEKIIRDISLYGDDKSFIQKKIKNENKLDLSDDQISKIAKLKFKDWGRFSKKLLVGIKASDKNTGEIDNIIGFMRNYNYNIMQLMANVFTFKDEIEKLNSKYYTDEKINIDYLDDLYLSSPAKRMLWQSFQIVDEIKNIKNSDPKKIFIEMARSKEDKPTRKMSRKSRLEKLYTDSKKQFIKLFGPDEYDKLNNEIKNKSESDFRWDNLYLYYTQFGRCMYSLDPIDLEELSNKNLYDQDHIYPKSKIYDDSIENRVLVKKQLNLDKSNEYPIPDRVLNKDKNKLLAFWKMLNEKELIGDKKYARLIRKSPFTDEELGDFIARQLVETRQATKETANMLKRLCPDSKIVYVKAKNVSDFRRKFDILKCRSINDLHHAHDAYLNIVVGNVFDTKFTSNPLNFIKNNSKNRSYNLEKIYDYDVIRNEKIAWLAERKEENQDGSIATVLKNLSKNDIRVTRRTYIKCEDLFDENIVRKGNGKFPIKENNNKSDTNKYGGYSGIKNAYFVLLEDEKHNRILEAIPSFIYKKEKNGEKGSVINYLQNILGIKSAKILRDKIKIGSLLKIDKFPYNLAGKSGNGILISGGVQLILDKNTSKYIKKIENYKYKLDENKDYQINIFDKLSKEENIKLFDLFVDKFENSIYKNRVNIKLKEIKLARPKFEHLSIEEQIKTLTQMLILFGRENNAVNLEYIGLPKNTGKTKINKKINNKDIKIINQSITGLYETEEDLANI

SEQ ID NO: 105 - protein, 1377 aa, Lactobacillus brevis
MESNHDGEQVKYTLGLDIGTSSIGYAAIDKHQKPIRAKGKHVIGVRLFQEGQTAADRRAFRTTRRRLKRRKWRLNLLNRLFDPYLSEVDPNFLPRLRQSNLSPKDDNKHFNGSTLFPDKTDAAFYRQYPTMYHLRYALMTEKRKFDIREVYLAIHHIVKYRGNFLNSATVDSFKTSNIDFTSQFDRLNELYRQVILDEPFQINMDQVDEMTNKLLDNDALKLDTQKQVAKLLPVIYNDKPIDKQYTRIATEFSKAILGYKTKLDVILNLDTQNAKDWVIRLDDEDIDDKLPALVENLDESRQEIVTIIRDLYAQITLNAIVPKGKSLSESMVDKYNDHKDHLDLLMGLIHELGDDSAKGIKLREAYTQYVGKSDDKTLNQDDFYAAIKKNLDEDSKRSPKIQRLIEQASFMPKQRTSANGVIPHQLHQLELDRIIENQGRYYPFLKKPNPNTHKPNGGKYKLDELVAFRIPYYVGPLITKRDQEKTSGADFAWMIRKPGQEGEITPWNFDQKVDRMASANRFIRRMTTKDSYLVAEDVLPDASLIYEKFKALNELNMLKVNDSRLSPSQKQDLFNNLFKKQKTIRTKKLQTYIRTNWELPSVMISGLADPDKFNSSLSTYIDFRDIFGEKVDDPNRQADYEEIIEWSTVFEDRKIYQAKLNQLDWLTEPQRKALLTKRYTGWGRLSKKLLTGLKDQNGDSILDQLWKTNDNFMQIQSRDEFAKQIHDENAKQFHEANNVDDILDDAFTSPQNKKAIRQVDKVVQDVVKAVGYAPDKIAIEFTRSLENNPQRTVSRQRQLQAAYKNIPREIMKSGLMAELGSVADSKKVLSDKLYLYFTQMGKDMYEDKTINIDNLPNYDIDHILPQAFIKDDSIDNRVLISKEENARKSNRVPLKFFGAKRMGFWKDLLNNGLISNRKFQNLTTDPEKISKYSAKGFIHRQLVETSQVIRLVANILGNEYSQAGTTIIEVSAKMNRQLREDFHLIKNRNVNDYHHAMDAYLTAYVGDYLYLRYPKLRPYFVYGDFKKAEDQDLNIRNFNFLHDLKDNESLDKIVDSETGEIVWEKHGSVKQLKKVYHYKFMLVSQEVYTRQDALFNQTIYPASDADKRKLIPIKNSKPVDVYGGYSGNIDAYMAIVRVHGKKEDNYKVVGIPMRAVTKLKKAEKEGHDSYLNAVHEVLKPQFTKKKKNRKTGEITETVDEFDVLLGKVYYRQLIVDGNKKFMLGSSSYQYNAKQLVLSDKAMQVLSKNGKVKSQDENQNLIDVYDEILEKVDQYFELYDQRHYRESLHKGRGIFVNLPLSNQYDGSKLTSYGKYETIDAILNGLHANATMSNLRYLGISSPFGKMQASNGLTIDPDSIICYQSPTGLFERQIKLSDL

SEQ ID NO: 106 - protein, 1239 aa, Lactobacillus buchneri
MTEKRKFDIREVYLAIHHIVKYRGNFLNSATVDSFKTSNIDFTSQFDRLNELYRQVILEEPFQINMNQVDKMTNKLLDNDALKLDTQKQVAKLLPVIYNDKPVDKQYTRLATEFSKAILGYKTKLDVILNLDTQNAKDWAIRLDDEDIDDKLPALVENLDESRQEIVTIIRDLYAQITLNAIVPKGKSLSESMVDKYNDHKDHLDLLMGLIHELGDDSAKGIKLREAYTQYVGKSGDKTLNQDDFYAAIKKNLDEDSKRSPKIQRLIEQASFMPKQRTSANGVIPHQLHQLELDRIIENQGRYYPFLKEPNSNTHKPNGGKYKLDELVAFRIPYYVGPLITKQDQEKTSGADFAWMIRKPGQGGEITPWNFDQEVDRMASANTFIRRMTTKDSYLVAEDVLPDSSLIYEKFKVLNELNMLKVNDRRLSISQKQDLFNNLFKKQKTIRTKKLQTYIRTKWELPSVMISGLSDPDKFNSSLATYIDFRDVFGEKVDDPNRQADYEKIIEWSTVFEDRKIYQAKLNQLDWLTESQSKALLTKHYTGWGRLSKKLLTGLKDQNGDSILDQLWKTNDNFMQIQSRDEFAKQIHDENAKQFHEANNVDDILDDAFTSPQNKKAIRQVDKVVQDVVKAVGYAPDKIAIEFTRSPQDRPQRTFSRQRQLQSTYLNVAKALMKSNLNQELKSVIDSQQTLTDKLYLYFTQLGQDMYTGKEINFDELVNYQIDHILPQAFIKDDSLDNRVLVSAPINNAKSDNVPVKKFGAKMGYFWKQLAENHLISKRKLNNLTTDPDKIGKFTAQGFIHRQLVETSQVIRLVANILGNEYGHDGTTIIEVTAKMNHQMRKDFDLIKIRDVNDYHHAMDAYLTAYVGDYLYLRYPKLRSYFVYGDFKKLKDQSLKIRNFNFLHDLTNDEAGDKIVDQETGEIIWDKHESVKQLKKVYHYKFMLVSQEVYTRQDALFNQTIYPASDADKRKLIPIKNNKPVDVYGGYSGNVDAYMAIVRIHGKKEDKYKVVGVPMRAVADLKKAESKGRDNYLNAVHEVLKPQFTKKKKDRKTGEITEMMDDFDVLLGKVYYRQLIVDGNKKFMLGSSTYQYNAKQLVLSDKAMQVLSKDDKLKNQDENQNLIDVYDEILEKVDQYFELYDINKFRQKLHDGRKKFIELPVDNDFNGKKLISYGKRATIISILNGLHANATMSNLKYLGISSPFGMLQVPNGIILSPASRICYQSPTGLFERKVKLSDL

SEQ ID NO: 107 - protein, 1381 aa, Lactobacillus fermentum
MDYVKEYHIGLDIGTSSIGWAVTDSQFKLMRIKGKTAIGVRLFEEGKTAAERRTFRTTRRRLKRRKWRLHYLDKIFAPHLQEVDENFLRRLKQSNIHPEDPAKNQAFIGKLLFPDLLKKNERGYPTLIKMRDELPVEQRAHYPVTNIYKLREAMINEDRQFDLREVYLAVHHIVKYRGHFLNNASVDKFKVGRIDFDKSFNVLNEAYEELQNGEGSFTIEPSKVEKIGQLLLDTKMRKLDRQKAVAKLLEVKVADKEETKRNKQIATAMSKLVLGYKADFATVAMANGNEWKIDLSSETSEDEIEKFREELSDAQNDILTEITSLFSQIMLNAIVPNGMSISESMMDRYWTHERQLAEVKEYLATQPASARKEFDQVYNKYIGQVPKEKGFDLEKGLKKILSKKENWKEIDELLKAGDFLPKQRTSANGVIPHQMHQQELDRIIEKQAKYYPWLATENPATGERDRHQAKYELDQLVSFRIPYYVGPLVTPEVQKATSGAKFAWAKRKEDGEITPWNLWDKIDRAESAEAFIKRMTVKDTYLLNEDVLPANSLLYQKYNVLNELNNVRVNGRRLSVGIKQDIYTELFKKKKTVKAGDVASLVMAKTRGVNKPSVEGLSDPKKFNSNLATYLDLKSIMGDKVDDNRYQMDLENIIEWRSVFEDGEIFADKLTEVEWLTDEQRSALVKKRYKGWGRLSKKLLTGIVDENGQRIIDLMWNTDQNFMQIVNQPVFKEQIDQLNQKAITNDGMTLRERVESVLDDAYTSPQNKKAIWQVVRVVEDIVKAVGNAPKSISIEFARNEGNKGEITRSRRTQLQKLFEDQAHELVKDTSLTEELEKAPDLSDRYYFYFTQGGKDMYTGDPINFDEISTKYDIDHILPQSFVKDDSLDNRVLVSRAENNKKSDRVPAKLYAAKMKPYWNQLLKQGLITQRKFENLTMDVDQNIKYRSLGFVKRQLVETRQVIKLTANILGSMYQEAGTDIIETRAGLTKQLREEFDLPKVREVNDYHHAVDAYLTTFAGQYLNRRYPKLRSFFVYGEYMKFKHGSDLKLRNFNFFHELMEGDKSQGKVVDQQTGELITTRDEVAKSFDRLLNMKYMLVSKEVHDRSDQLYGATIVTAKESGKLTSPIEIKKNRPVDLYGAYTNGTSAFMTIIKFTGNKPKYKVIGVPTTSAVGLKRVGKPGSESYNQELHRIIKSNPKVKKDFEIVVPHVSYSQLIVDGDCKFTLASDTYQHPATQLVLSKESMEIIADDFKFVKENPATADEQLVRVFDEIVNQMNHYFTIFDQRSNRQKVTKARDKFVSLPTESEYEGAKKTQVGKTEVITNLLMGLHANAAQGDLKVLGLSTFGFFQSSGGLNLSEDAMIVYQSPTGLFERRICLKDI

SEQ ID NO: 108 - protein, 1306 aa, Sphingobacterium spiritivorum
MKHILGLDLGTNSIGWALIKQNFENKQGEILGMGSRIIPMGAELSKFEQGQAQTKNANRRIARGTRKLNKRYKQRRNKLIYILQGLGMLPDQIKLVNQFSDPNKLDKISILPISKNQQQLTAFDLLELRVKALTEKIELEELGKVIYKYNQLRGYSGGNSEPEKEENNEDESEENEKTNDSFVVFSKVLSLGLPEEITFKGKKLSKRKIAIETEDGIIEAETFLDSLKENDSLELHVNIRRAKSGDTITIKLPSKTSWRKKMENIEKQLADKSKELGREYFISELLFDILKENKWAKIRNNVILRSRYESEFDAVWSEQSKYYPILNHLETDRLQKILEFIFPGQKESQEKLRQTGLKEGLKYVIKNQVVFYQRELKDQSDLISNCRYEPTEKVVAKSHPVFQEYKIWEQINKLVINTKIENGVNRKGEIRYKYIDKPIPVALKEWLYEELQSKKEVSFNPILTKLKKEFKLRENVDFLNGMNAKDKLKGNETKVILQKALGELWNIFGLDDSERQVELWEILYNGKGNEYDLTSERTSNILAFIEKYSPDLENKNDVAIKISKIKFSRNYSNLSLKAIDNILPLVRAGKFFDQNFSEALSHKIVKLLNENVEDPFEKSAQEFLDKNQDVLSDGGIVNAIATILVYDKHTAKEYSGDELIKEFTQISRLKQGELRNPLAEQIINEALVIVRDIWRKYGFKPDEIRVELARELKNNAVERGKMYSANLKSQKHNAEIRNKLIELKQEISIANIEKYKLWVSQENLQEVYLKNYNDPSKSEIEKLKLWESQGHISPYTGQPISLSELFNRERYDVDHIIPQSRYFDDSLSNKVICEKSINNEKGNRTSMEYFEVGSVNYRIFTKDQFIDHANKYFSGKKRKNLLATSIPEDPIQRQIKDTQYISIRIREELNKIVGNENVKTTTGGITDYLRNHWGLTDKFKVLLKERYEAVLPKIAQLEYDNYKKETEKKFTEYKNADVEFNEPILDEEIFIEKFRSEFIRKKNNKLIIKGWSKRIDHRHHAMDALVIACTQPAHIKRLNDLNQVLKEWLDKNKEKFFPGFSGTKTELLDEVLNLEEEKRREIFNQLEKFRAIEMPWKGFPEEAEQKLKEVIVSHKPKDKLLLQYDIQGNKQIKLRGQLHEGTLYGLSNGKEIYRIPINKLAGKQFATEKTIEKIVNPFLKNVIEEHLKSFGKKEEAFSAEGILDLNKKLAERKDEQQNPKPHPPISTIKIYYKDPSKSKKKKTDDEDDISLQKLNRKKSFNDSLYVKTGDNYLFAVMEKEVFNKKLNKDKTERHYDLKLFLTLLIF

SEQ ID NO: 109 - protein, 1358 aa, Acidaminococcus sp.
MGKMYYLGLDIGTNSVGYAVTDPSYHLLKFKGEPMWGAHVFAAGNQSAERRSFRTSRRRLDRRQQRVKLVQEIFAPVISPIDPRFFIRLHESALWRDDVAETDKHIFFNDPTYTDKEYYSDYPTIHHLIVDLMESSEKHDPRLVYLAVAWLVAHRGHFLNEVDKDNIGDVLSFDAFYPEFLAFLSDNGVSPWVCESKALQATLLSRNSVNDKYKALKSLIFGSQKPEDNFDANISEDGLIQLLAGKKVKVNKLFPQESNDASFTLNDKEDAIEEILGTLTPDECEWIAHIRRLFDWAIMKHALKDGRTISESKVKLYEQHHHDLTQLKYFVKTYLAKEYDDIFRNVDSETTKNYVAYSYHVKEVKGTLPKNKATQEEFCKYVLGKVKNIECSEADKVDFDEMIQRLTDNSFMPKQVSGENRVIPYQLYYYELKTILNKAASYLPFLTQCGKDAISNQDKLLSIMTFRIPYFVGPLRKDNSEHAWLERKAGKIYPWNFNDKVDLDKSEEAFIRRMTNTCTYYPGEDVLPLDSLIYEKFMILNEINNIRIDGYPISVDVKQQVFGLFEKKRRVTVKDIQNLLLSLGALDKHGKLTGIDTTIHSNYNTYHHFKSLMERGVLTRDDVERIVERMTYSDDTKRVRLWLNNNYGTLTADDVKHISRLRKHDFGRLSKMFLTGLKGVHKETGERASILDFMWNTNDNLMQLLSECYTFSDEITKLQEAYYAKAQLSLNDFLDSMYISNAVKRPIYRTLAVVNDIRKACGTAPKRIFIEMARDGESKKKRSVTRREQIKNLYRSIRKDFQQEVDFLEKILENKSDGQLQSDALYLYFAQLGRDMYTGDPIKLEHIKDQSFYNIDHIYPQSMVKDDSLDNKVLVQSEINGEKSSRYPLDAAIRNKMKPLWDAYYNHGLISLKKYQRLTRSTPFTDDEKWDFINRQLVETRQSTKALAILLKRKFPDTEIVYSKAGLSSDFRHEFGLVKSRNINDLHHAKDAFLAIVTGNVYHERFNRRWFMVNQPYSVKTKTLFTHSIKNGNFVAWNGEEDLGRIVKMLKQNKNTIHFTRFSFDRKEGLFDIQPLKASTGLVPRKAGLDVVKYGGYDKSTAAYYLLVRFTLEDKKTQHKLMMIPVEGLYKARIDHDKEFLTDYAQTTISEILQKDKQKVINIMFPMGTRHIKLNSMISIDGFYLSIGGKSSKGKSVLCHAMVPLIVPHKIECYIKAMESFARKFKENNKLRIVEKFDKITVEDNLNLYELFLQKLQHNPYNKFFSTQFDVLTNGRSTFTKLSPEEQVQTLLNILSIFKTCRSSGCDLKSINGSAQAARIMISADLTGLSKKYSDIRLVEQSASGLFVSKSQNLLEYL

SEQ ID NO: 110 - protein, 653 aa, Oribacterium sinus
MELINSEEFTFKEELEKHTQVAMKQLSEFTYEDLEDSYFSVPVKRMIWQTLLVVREIEKVMGYAPKRIFVEMTRTEEEKGDKGRKESRGNQLLELYKSIKNTDSHNWKEEIAAADKDGKLRSKKLFLYYMQMGRDMYTGEEIDLGRLYDDNLYDIDHIYPRHYVKDDSIMNNLVLVNRRANQDIKKDLYPIPEQIKANPNVHMLWDALHKQKLITDEKYARLTSNTAFSEKQLGDFIARQLVETGQGTKGVADLLEQLFKDTVIVYAKASNVSDFRRDNGFLKSRLVNDFHHAQDAYLNIVVGNVYYTKFTKNPWNFICKDYEKDKEKNRYNLARMFDWNVVRGSETAWIVERKDEKGTISTVRKMMQKNTPLLTRMNFEQHGSIANATLYSAKKAKSENYLPLKTADEKMSDVKKYGGYTSMSIAYYFIVHHKEDKKENVTIEALPLYCKDKVEREENGLEKYCEEVLGYGEVNIIRRKLKIQSLLEFNGYQVHLSGKTGNQLILRNAISLCLSTKWITYIKKLEKAVNIQIVEEVVTPEENIKLYNLLADKHANTVYSKRPNAYGEKLLADREIFVTLEFGKQCEALLQILSLTKIGSTEANLLLIGESEHSGKILISKNLKASDRPAVINQSPCGLYEKKEWIFDKIVEK

SEQ ID NO: 111 - protein, 1436 aa, Capnocytophaga gingivalis
MKYIKYILGLDIGSNSIGWALIQLDLLQKTKRIIAAGSRIIPMDQKVLSDFGKGITISPTAQRTSYRNARHCRERHLLRRERLHRVLHILGFLPTHYDKQIDFSKRYGKFVDNTEPKIAYNEGKFLFMDSFQEMLSDFKSHQPDLFYTKKNGEESKIPYDWTIYYLRKKALSQKISKEELAWIILNFNQKRGYYQLREEEGNKENDFEIISSKIISVIKKDKDKKYNKYWYDIILENGLVYQAAFYNDFVYNWINQDREFIIERTSLKNGAEKVKLSYLPTFDEIDKMDKKEQDKYYKKIKIKTENSIGNKTVGCYIYDHILQNPNEKIKGKLVRTIERKYYKEELKAILEKQIALQPELFTDQLLADCIRELYSKNEAQQRNLAARDFVHLLVEDIIFYQRPLRRQKSTLANCSLESRSYIDKDSHTRKEAPLKVCPKSNPYYQEFRVLQWLQNLKIYEIDSDQEVTHQFIKTLEDKQQLFEFLMAQKEIDCEELLKYFLNQTYPNAKEKALKSELKKWKDTYRWNYVYDIGEKSSKKYPMNETRYELKRHLEKVANLPDDFLSSEVEYLLWHLIYSVKDKVAYEKGLKKFAQKHHLDKDSFVESFKKFNPYPSEYGSFSEKAIRKLLPLMRFGAHWDFNHIDKNTQKRIEDLITGVENEEIRTILREKAEKYQLEKETDFQDLPLWLAQYIVYNRHAEASSLEKWTSVNDLETYLNEFKQHSLRNPIVEQVVMETLRVVRDIWQQYGQGQASFFNEIHIELGRELKKTAKEREKLSKQNQKNEDINLSIKEKLKELEKYNTRAYSITHQEKYKLWLEQKHISPYTGQIISPENLFTDNYEIEHIIPQSRFFDDSLSNKVVCESIVNKAPYKDRQLGLEFIKNQGGRIVKELSKENKTIKIFTEEQYRTFIKEHYSNNPEKTKKLLLEEIPEKMVARQMNDTCYISKFISEILSKIVRSDEQDEGVHSKNVILCTGKITSILRQDWGLNDIWDNLILPRFERMNNLLQKEKFTIYSIEKQKKIPVVPINDQFKSFQKKRIDHRHHAMDAIIIACTTREHINYINNQHALEKEKDKKEKQEERDKLREKLCIKKYNNRSEGNYSWIFKKPWDTFTQEVRVALEDIVVSFKQNLRVINKATNYYERWVEENGKYIKKMVKQEGTNWAIRKPLHEETISGKIYLDREKITKNDILTATRKTVDSSFDDKRIKKITDTGIQKILLNYLKYKGSPEIAFSPEGLEELNKNLSIYNDGKPHKPIYKVRIYEKGSGRFALGEKGRKYKKYVQGASNLYFGIYQGAKRSFATIPLNEVIERQKQGLPSVPEYNEKGDLLLFSLSPNDLVYVPIEGEIIENIDFRNLSKEQKERIYNVNDFSSTCYFTPNRIAKAIFPKEVDLQRKGDKLSGSYDTKTASLEGIQIKEVCIKLKVDRLGNISKA

SEQ ID NO: 112 - protein, 1069 aa, Bacillus cereus
MNYDIGLRIGITSCGWSIINKDLERIEDLGVRVFEKAENPDGTASAAPRREARKSRRKHRRKKHRIERIKRLIVQHDLLSKKELDSLYLSPFNIDVWNLQVEALERKLDNREFARVLIHLVQRRGFQTIRKSVEIQEEGKLLENVSENERIMKVNGYKTVGEMFSKHEKFTHHKRNKDGSYTSVVTRSLLLKEIKTIFNSQRILGNVFSTQKLESDYLYIWGSQRPTLTYEQLMSMVGNCIYEKKEKRAPKTSWAFQYFSLLQKINKLKVSDDNTLRKLSKEERDIVIELAFKKKNVSFVDIRKALKLNDNTKFNHLTYSHVVETKKVEKATFIELKGYHLIKKQLKDRNVELTQELQPKDYDAIAAASTFFKNDIEFRDYLRNQYLDSNGKRKSNIANKVFEDKVIAAVFELNFSKVCHLSFKSLYKLIPHLEKGLDYKEAILCAGYNFRDENKRDKKLFLPVIQQETNPVVHRALTQARKVINAIIREYGSPNTIRFVVANDLAKTYKQRKELESTLKKNRAENEKIKTKLLSMGIINPTGMDIVKYKLWYEQSGICLYTGRQMELSSLFKPGYSIVNHIIPYNRSFDDTYHNRVLTLTETKYEKGNKIPFEYFGAEETCWNEYEKRVSTSKKIHDKKREKLLIRNFDIEYENEMISNNVFDTHYIGSYFEKYIDEHLQFKKSTKKQKVFSIHGNMVAHLHSRWGFNKNSREIYLNHAVDAAIVAVLTDQLIRNIADYYRRDNILEQKGSLKFPEPWKSFSIELEARISPQVRDLIKKLNLDSYLDVDILHIKPVFISKKPRRKVNGEAHKSTIRSLIGINEIGKTVTCIKTRLEDIPFDENGDFPMYGKDTDKYTYTAIKERYLEFNKDKEKAFSTPLYKLKRNGEPGNQIKSVKIIDTRNIVNKVNQGKGIAYNSNIIRVDVFSRDQKYYVVPIYLRDFIKGSLPNKIITAAKGFMQWPETDNSYTFLFSIFPNDLIKVVPKEGKFIKAKNENKENINLTEILGYFKGLDSSTGAFTLESHDGSLLARGIGTKNLLLIEKYQVDVLGRYNKVGNEERQDIKIQQN

SEQ ID NO: 113 - protein, 1391 aa, Lactobacillus jensenii
MKEIKDYIIGLDIGTNSCGYVVTDKQNNILKLKGKTAIGARLFKEGEAAADRRAFRTTRRRLARRRWRLSLLEEIFDEEMNKVDPSFFRRLKESDYSPKDRRKQFNSIVFESSEADKAFYEKYPTIYHLRNALMHDNQKHDLREIFLAVHHIVKYRGNFLREDSVKAFKAAKFTLQGEDGIGPVDKLNDLLKEIYIEAAPELATDNLSKIEDIIKDKKLYKQDKLKQIANLLPKAVDSKDKAKLNKDIAKQVANALMGYMFRLDTLFSFTDVDVKDYKLKFSDANIDESLDALTSLLTDAQIEFVLELQSIYNTIVLNEIVPDGMSLSESMVKKYDDHKKDLKLYKEYIDSLSDQKKAKQLEAAYALYVNYRKADLLAAKKLFEKKKIGDKKFVDVISNFEVFGKFVSDNLDDSELANKIKARLDLGEFLPKQRTNQNGVIPYQLHQVELTQILEKQGKYYPFLITPNPVESHRNNAPYEISELVSFRVPYYVGPLIDNQSIKDKQNKNKFAWMVRQKQGQITPWNFEEMVDTTESANQFIKRMTRKDTYLLAEDVLPKSSLIYQKFMILDELNRIKIDGKKLTSKLKHDIFEKLFKKQKSINLDNLKNYLLAEGNIPGLIEGLSDGINFNNSFSTYIDYRNIFGDEIDNPNKQADFEKMIEWSTVFEDRKIFKRKLKEITWLTPEQIKQVSSKRYSGWGRLSKKLLTQITDENGVNILQRLWNEPETLTEVLANPVIKRKISEANSLFVQINKVENILDDAYTSPQNKKAIRQVIRVVDDIIAAAHGKKPSQIAIEFARSSQNKAKVPDTRKKQLDKIYNKISSEILDSSIKNELKNLKSNKYLSKDKLFLYFKQMGRDAYTGDKLSLDQLQNYDIDHIFPRSFIKDDSLDNRVLTQKPINAKKSDYGIPALEFGNKYVPDLGITVKEMWKLWQENGLISKSKLINLCTNPKKIGSKRASGFINRQLVETSQVIKLVAIILQAEFPDTEIIEVKALQNTTLRESFHLYKNRSVNDYHHAIDAYLTTIVGNYLYQVYPKLRPYFVYGQFKKFNQEKNIDILKRLKNFNFLRQLIFNTDDNIYISGTKEIVFNKKDIIHKLETAYGYKYMNISRECYQETSSLFNQTLYAHNSSVKNSLIPKKKGLPTEIYGGYSGNKDSFFVLVKIVKKRTNLYRIVGIPTRELAKLNSSNNYNQALNKIVESKLCLKETESFKILIKRLLYGTLIVDNGQKFRIGSFKEKHNVQQLVLQLKSMKYIKFYIDGGQNYFTDVERKKLEKQDRDKCLLYVFDDIMNVVNKRFTLFDMSKYEKDGDSLREKFNCLDFNDKVSILSDLLKAFHANSDRTSITKLKITNLGRHQAGKNGITLTTNAQIIYQSPTGLFERRIKIKDL

SEQ ID NO: 114 - protein, 1114 aa, Eubacterium rectale
MNYTEKEKLFMKYILALDIGIASVGWAILDKESETVIEAGSNIFPEASAADNQLRRDMRGAKRNNRRLKTRINDFIKLWENNNLSIPQFKSTEIVGLKVRAITEEITLDELYLILYSYLKHRGISYLEDALDDTVSGSSAYANGLKLNAKELETHYPCEIQQERLNTIGKYRGQSQIINENGEVLDLSNVFTIGAYRKEIQRVFEIQKKYHPELTDEFCDGYMLIFNRKRKYYEGPGNEKSRTDYGRFTTKLDANGNYITEDNIFEKLIGKCSVYPDELRAAAASYTAQEYNVLNDLNNLTINGRKLEENEKHEIVERIKSSNTINMRKIISDCMGENIDDFAGARIDKSGKEIFHKFEVYNKMRKALLEIGIDISNYSREELDEIGYIMTINTDKEAMMEAFQKSWIDLSDDVKQCLINMRKTNGALFNKWQSFSLKIMNELIPEMYAQPKEQMTLLTEMGVTKGTQEEFAGLKYIPVDVVSEDIFNPVVRRSVRISFKILNAVLKKYKALDTIVIEMPRDRNSEEQKKRINDSQKLNEKEMEYIEKKLAVTYGIKLSPSDFSSQKQLSLKLKLWNEQDGICLYSGKTIDPNDIINNPQLFEIDHIIPRSISFDDARSNKVLVYRSENQKKGNQTPYYYLTHSHSEWSFEQYKATVMNLSKKKEYAISRKKIQNLLYSEDITKMDVLKGFINRNINDTSYASRLVLNTIQNFFMANEADTKVKVIKGSYTHQMRCNLKLDKNRDESYSHHAVDAMLIGYSELGYEAYHKLQGEFIDFETGEILRKDMWDENMSDEVYADYLYGKKWANIRNEVVKAEKNVKYWHYVMRKSNRGLCNQTIRGTREYDGKQYKINKLDIRTKEGIKVFAKLAFSKKDSDRERLLVYLNDRRTFDDLCKIYEDYSDAANPFVQYEKETGDIIRKYSKKHNGPRIDKLKYKDGEVGACIDISHKYGFEKGSKKVILESLVPYRMDVYYKEENHSYYLVGVKQSDIKFEKGRNVIDEEAYARILVNEKMIQPGQSRADLENLGFKFKLSFYKNDIIEYEKDGKIYTERLVSRTMPKQRNYIETKPIDKAKFEKQNLVGLGKTKFIKKYRYDILGNKYSCSEEKFTSFC

SEQ ID NO: 115 - protein, 1362 aa, Lactobacillus paracasei
MTKLGKPYGIGVDIGSNSIGFAAVDENSHLIRLKGKTVIGARLFEEGKAAAKRRAGRTTRRRLSRNRWRLSFLRDFFESHITPTDPNFFMRQKYSEISPKDKARYKYEKRLFNDRTDAEFYQQYSTMYHLRNRLMTDPSRADVREIYFAIHHILKSRGHFLTPGDAKDFNTNDVALDEIFPALQDAYAQVYPDLGITFDEDKANEFKTILLNEIATSIDTQRALVKLLLAEEDDKDILKQQKQVLTEFAKAVVGLKTKLNLALGTEVDSSEATAWNFSLGQLDDKWAGIESAMTDEGTEILDQIRDLYRARLLNGIVPTGKTLSQAKVDDYTQHHEDLQLFKAYLKQLEDDGTAKAIRQLYDRYIDGDDAAPFLRENFVKALTKDVTAHPNTKSPELLERLAQPDFMLKQRNKANGAIPVQMQQRELDQIIKNQAVYYDWLAAPNPVEKHRKSMPYQLDELLNFRIPYYVGPLVTAKEQKAAQGGVFAWMVRKDPEGNITPYNFDEKVDREASANTFIQRMKTTDTYLIGEDVLPKQSLLYQRYEVLNELNNVRVNNEKLSIEQKQQVIRELFERHNSVTIKQFAENLRAHGDYAHIPEIRGLADEKRFLSSLSTYRQLKSLLPEAIDDPAKQADIENIIAWSTVFEDAAIFKTKLKEISWLGSEAITKLSNIRYRGWGQFSRKFLNGLTLGNGHTIIQELLLSTNNLMQILTDETLQKKMTELNADKLKTANINDAIDNAYTSPSNKKALRQVLRVVDDIKRAADGQDPSWLYVETADGGGTPGKRTRARQHQLQEIYANAAHELIDTAVRGELEDKISDKADFNDRLVLYFMQGGRDIYTGAPLNIDQLSSYDIDHILPQSLIKDNSLDNRVLVHAIINREKNATFASTIYAQKMNATWRQWHEAGLISGRKLRNLQMRPDQIDKYASGFVARQLVETRQIIKLTEQIVAAQYPDTKIIAVKAGLSHQLREELEFPKNRDVNHYHHAFDAFLAARIGTYLLKRFPNLQAFFTYGKFTKADVKKLRGFNFIRDITHAEDKIVAKDTGEVVWDKQRDVDELDRIYNFKRMLITHEVRFETADLFKQTVYGARDSKEAGGSKQLIPKKKGYPVDIYGGYFRENTAYLAVVKVTKKTETIFKVVKIATSQVAALNKARSRSTAEELSVLTELLKPKFSKVGKNGKITDTPFEVVLPRVPREQLFYNAKYGFFMVNSDTMFHNFQEIWVSRSDQKILQQIRKAKIDYPNVDQDLDNLFHNLADQIVKYFDLYSIAGFKEKISQSQNTFNDLAVDDTDQSVGKITVINELLKGAQANGMTGSLKVLKISTPFGFTQDKSGVLTKDSSIIYQSPTGLFERSVRLTDL

SEQ ID NO: 116 - protein, 1056 aa, Actinobacillus minor
MKALNYILGLDLGIASVGWAVVEIDQNELPIRLIDLGVRTFERAEVPKTGDSLALARRLARSSRRLVRRRAVRLLKAKRLLKQEGILQADDFHSSHLKPLPNNPWELRVKGLNHLLDRKEWAAVLLHLLKHRGYLSQRKNESKTDNKELGALLKGVSENRQLLQAQAFSTPAEIAIKKFQQEEGHIRNQRGAYSHTFDRNDLLAELRLLFQKQREFNNPYTSQSLEQAIAELLMWQKPALSGEAILKMLGKCTFEPSEYKAPKNSYSAEYFVWLTKLNNLRILENGADRGLTAEERQLLINQPFEKAKFTYAQARKLLELSDLAIFKGVRYGKDNAESATLMEMKAWHAIRKALESNGLKTEWNGLKTKPELLDKIGTAFSIYKTDEDISQYLNGELSPAVLNALLENLSFDKFIRLSLQSLAKILPLMEQGLRYDEACKQVYGDHYGKKEQLELRFLPKIPVEDIRNPVVLRTLSQARKVINGVVRLYGSPARIHIETGREVGKSFSERRDISKRQEENRNERQRAVEKFKEFFPHFVGEPKAKDILKMRLYEQQHGKCLYSGKELDLNRLLEKGYVEIDHALPFSRTWDDSFNNKVLVLASENQNKGNQTPYEWLNGKENAERWKLFQALVNGSRFPYSKKQRILTKYLDEDGFRERNLNDTRYVARFLCNFIEDNMQLVGQGKKRVFASNGQITALLRRSWGIQKVREDNDRHHAVDAVVVACSTRALQKKITDYVRYKEMNVFTGEKIDQETGEIIKFHFPEPWKFFRQEVEIRVFSETPAEDVVIALPDRPQANHEFIQPLFVSRAPTRKMTGQGHMETIKSAKRLAEGLSVSRVPLTQLKLKDLENMVNREREKALYEALKVRLEKFNNDPAKAFADPFYKKGGQQVKAVRVEQVQKSGVLVRQENGVADNASMVRVDVFIKGGKYFLVPIYTWQVAKGILPNRAATQGKEEEYWDIMDETAIFQFSLYQNDLIKLVTKKKTIFGYFNGLNRATSNINIKEHDLDKSKGKDGIYLEVGVKLALSLEKYQVDELGKNIQPCRSMKKRPPVR

SEQ ID NO: 117 - protein, 1081 aa, Neisseria flavescens
MTAFKPNPINYILGLDIGIASVGWAMVEIDEEENPIRLIDLGVRVFERAEVPKTGDSLAAARRLARSVRRLTRRRAHRLLRARRLLKREGVLQAADFDENGLIKSLPNTPWQLRAAALDRKLTPLEWSAVLLHLIKHRGYLSQRKNEGETADKELGALLKGVADNAHALQTGDFRTPAELAVNKFEKESGHIRNQRGDYSHTFSRKDLQAELVLLFEKQKEFGNPHISDGLKEGIETLLMAQRPALSGDAVQKMLGYCTFEPTEPKAAKNTYTAERFIWLTKLNNLRILEQGSERPLTDTERATLIDMPYKNKLTYAKARELLGLDDTAFFKGLRYGKDNAESATLMEMKAYHAIRRALEKEGLKDKKSPLSLSPELQDEIGTAFSLFKTDEDITGRLKGCLQPEILDALLKHINFDKFVQISLKALRRIVPLMEQGKRYDEACAETYGDHYGEKNSEEMLYLPPIPADEIRNPVVLRALSQARKVINGVVRRYGSPARIHIETAREVGKSFKDRKEIEKRQEENRKDREKAAAKFREYFPNFVGEPKSKDILKLRLYEQQHGKCLYSGKAIDIRRLNGKGYVEIDHALPFSRTWDDSFNNKVLVLGSENQNKGNRTPYEYLNGKDNSREWLEFKARVETSRFPHSKKQRVLLQKFDEKGFKERNLNDTRYVNRFLCQFVADHMQLTGKGKRRVFASNGQITNLLRGFWGLHKVRAENDRHHALDAVVVACSTVAMQQKITCFVRYKEMNAFDGKTVDKETGEVLHQKTHFPQPWEFFAQEVMIRVFGKPDGKPEFEEADTPEKLRALLAEKLSSRPEAVHEYVTPLFVSRAPNRKMSGAHKDTLRSAKRFVKHNEKISVKRVWLTEIKLADLENMVNYKNGREIELYEALKARLGAYGGNAKQAFDPKDNPFYKKGGQLVKAVRVEKTQESGVLLNKKNAYTIADNGDMVRVDVFCKVDKKGKNQYFIVPIYAWQVAENILPDIDCKGYRIDDSYTFCFSLHKYDLIAFQKDEKSKVEFAYYINCDSSNGRFYLAWHDKGSKEQQFRISTQNLVLMQKYQIDELGKEIRPCRLKKRPPVR

SEQ ID NO: 118 - protein, 1392 aa, Gemella haemolysans
MANKTWYLGLDIGSASVGWAATDTGYKIIRKNKKRLWGVRLFEEAKTAEDRRGYRSSRRRLARRKWRLNLLEELFTSEVKKVDENFFLRLKESQYHYEDKTHKVPYAIFNDKDYTDKDYYKDYPTIYHLRSKLMTEENPDIRKVFLAIHHIIKNRGHFLLQGQSFKDGNLNNLIKELLELDILHVGFEVTEEVVDKIADISLEKKTSKDKLNDIKELYPKEKQLLEVFRLIFGGKTSLDKLFAIDEYKELDAAIKSVSFKEKIYEEVRHDYEQVLSNYIELLDLAKLVYDSIILSDIKKEGKTLSESKVELFEKHRDDLLKLKNLVKNDSKLSEDKKVELYALIFKEDKDKGTNYVNYIRKSEEGKGCNYEDFKKFLVKELAKLEESSVKTEIIKDLELEQFLPLQRTKDNSVVPYQIHKEELVKILDNAARYHSFLNEKDESGYNVREKVIQLLEFRIPYYVGPLNSSKKAKEGGFAWSVRNTGYENTPVTPWNYSKVIDESASAEKFITNLTNKCTYLKGEDVLPKSSLLYSEFALLNELNALKYDGNRISLEARNTIIEKLFKQQGKKVTKTSIKNLLKAEGYIDGKGEITGIDITVKNDLKSYRDFKKILGNKFNSEHVENIILWITLYGESRKLIKAKIESVYGEVYSKDEITKMSRLVYKDWGRFSRKLLTELVSKKLYNEETGECLNIIGAMRQNNILFMELLADRFDYSKQIVEFNKELQEDVTEIAPEILDDLYVSPAVKRSIWQTVRIVEELKKIIGCAPAKIFVETTRSNQEKKKPTDSRKKQLELAYKAVKKDVKELEKEIGTINFDVLNDRLSSVEPSKLKAKKLYLYYTQLGRCMYSEEPINISELFDNNKYDIDHIYPQSKIKDDSFTNTVLVKRESNAAKTDRYPLGSDIQTPSNRRFWKFLKEKGLISDEKYNRLVRTEEFSDEELSGFIARQLVETSQSVKAVASILGELNPETSICYSKAENVSSFRQNFGKIKKGDRDSKNNDQLIKVREINDYHHAKDAYLNVVVGNVYDTKFTRNVFNFIKDKKDGRKYSLNKVFYENVSDSKTVAWEMDKTIHQVEKVMNNNNIMVTRRTSEQKGGLFDATVYKAKVAAKAKDGVYYPLKTSNSVVKDVAKYGGYTSIGIAYYSIFEYTIVNKKGEEKITRIIPIPIYISQNIKDSTALIEFGKSQIFCRAYEKIKDFKLLYRKLCIGSKININNYQYYIGGKSDERFYYDSAIQVTLDKKSEKYLKILSKYQNWKKENKDGELWENITKENNIELYNKLVEKMNSEIFTKKKSNKYNELNSEEIRNNFIKISVEEQAKVLLEILNLLTNKKSIFDLKSIDIKAARGKISFNLTSLIQFSIIEQSITGFYEKEITIIGDKGNDMENNNS

SEQ ID NO: 119 - protein, 702 aa, Helicobacter pullorum
MRKILKIDERIQFKEVDYTAKNPENKKFVEFKNLKKFCEILGAIVGDRALADSIARDMTLIKDEEELAQKLRGYGKFSQEQITQLSALHFSHHISLSLKALSEILPFMREGMRYDEACQEAKLQAKHNDKKSKFLPPFCESIYADELTNPVVHRAIAEYRKILNALIAKYGSVHKIHIELTRDVGKNFQEREKYKKEIESNYKARVQAMQECEKLGLTLSEGNILKLRLFREQNEICVYSGRKITLANLKEQGALEIDHILPYSRSSDDSYMNKVLVFTNENQNKGNKTPYEAFGGDSQKWGEIESLALRSGYPKKKAKRILDKGFGDREAGFKSRNIVDSGYIARLIANYTKEYLKFLPLDSHENTALIAGEKDSKIHVEAVKGMLTATMRHFWGLGSKNRYEHTHHAVDAIIIAYINAAMIQRFSQFRQNQESLKARFYAKELAKEEFKTQRAFFEPFSGFREQVLAKVGQIFVSRPPRKRARGALHEETFYSIDDKKLSETYGGKKGVQRALSLGKIRQIGTKIVANGPMVRVDIFKHTQSGRFYAVPIYTMDFALGILPNKAVVSGKDKDRIIKDWLEMDSCYEFCFSLFKDDVIEVQKRDMEKPELAYFVSLDASDGRIKVRHHCNDITKINENQKKLFSEAIEKEVVGRGSIQNLKVFKKYKVSPLGEIKEAKYEPRQPIALKTSPKKHRKQNNAQ

SEQ ID NO: 120 - protein, 1371 aa, Streptococcus dysgalactiae
MDKKYSIGLDIGTNSVGWAVITDDYKVPSKKFKVLGNTDRHSIKKNLIGALLFDSGETAEATRLKRTARRRYTRRKNRIRYLQEIFSSEMSKVDDSFFHRLEESFLVEEDKKHERHPIFGNIVDEVAYHEKYPTIYHLRKKLADSTDKADLRLIYLALAHMIKFRGHFLIEGDLNPDNSDMDKLFIQLVQTYNQLFEENPINASRVDAKAILSARLSKSRRLENLIAQLPGEKRNGLFGNLIALSLGLTPNFKSNFDLAEDAKLQLSKDTYDDDLDNLLAQIGDQYADLFLAAKNLSDAILLSDILRVNSEITKAPLSASMIKRYDEHHQDLTLLKALVRQQLPEKYKEIFFDQSKNGYAGYIDGGASQEEFYKFIKPILEKMDGTEELLAKLNREDLLRKQRTFDNGSIPHQIHLGELHAILRRQEDFYPFLKDNREKIEKILTFRIPYYVGPLARGNSRFAWMTRKSEETITPWNFEEVVDKGASAQSFIERMTNFDKNLPNEKVLPKHSLLYEYFTVYNELTKVKYVTEGMRKPEFLSGKQKEAIVDLLFKTNRKVTVKQLKEDYFKKIECFDSVEISGVEDRFNASLGTYHDLLKIIKDKDFLDNEENEDILEDIVLTLTLFEDKEMIEERLKKYANLFDDKVMKQLKRRHYTGWGRLSRKLINGIRDKQSGKTILDFLKSDGFANRNFMQLINDDSLTFKEAIQKAQVSGQGHSLHEQIANLAGSPAIKKGILQSVKVVDELVKVMGHKPENIVIEMARENQTTQKGQKNSRERMKRIEEGIKELGSQILKEHPVENTQLQNEKLYLYYLQNGRDMYVDQELDINRLSDYDVDHIVPQSFIKDDSIDNKILTRSDKNRGKSDNVPSEEVVKKMKNYWRQLLNAKLITQRKFDNLTKAERGGLSELDKAGFIKRQLVETRQITKHVAQILDSRMNTKYDENDKLIREVKVITLKSKLVSDFRKDFQFYKVREINNYHHAHDAYLNAVVGTALIKKYTKLESEFVYGDYKVYDVRKMIAKSEQEIGKATAKRFFYSNIMNFFKTEITLANGEIRKRPLIETNEETGEIVWDKGRDFATVRKVLSMPQVNIVKKTEVQTGALTNESIYARGSFDKLISRKHRFESSKYGGFGSPTVTYSVLVVAKSKVQDGKVKKIKTGKELIGMTLLDKLVFEKNPLKFIEDKGYGNVQIDKCIKLPKYSLFEFENGTRRMLASVMANNNSRGDLQKANEMFLPAKLVTLLYHAHKIESSKELEHEAYILDHYNDLYQLLSYIERFASLYVDVEKNISKVKELFSNIESYSISEICSSVINLLTLTASGAPADFKFLGTTIPRKRYGSPQSILSSTLIHQSITGLYETRIDLSQLGGD

SEQ ID NO: 121 - protein, 1007 aa, Helicobacter canadensis
MKVLGFDIGINSIGWAFVENNELKDCGVRLFTKAENPKTKESLALPRRNARSSRVRLRRRRSRLLSLKHIISKEFGLHYEDYIALDGNLPKAYTGKIESIYKLRYEALSQAISKEDLARVILHIAKHRGYMNKNQKTSQDSEKGAILSAIKENSNKIKHYQTAGEYFYKELFENLRDGTKEFKNIRNKAMKNEKTGNMESTYYNTILASDLEKELKLILEKQQAYHNYSDTFIKEVLEIAFYQRPLKDFSHLVGSCTFYENEKRACKNSYSAWEFIALGKIINTLESIKKDTGEIFSNEIITQILKEVLDKGSLSYTKLRKMINLDEKVKFKGLKYDKEGVEKTNLIEFKKLKEFKKALGEHNLERKTLDEIATHITLTKDENQLKKQLEQYALSQNQIDALAELDFNDHINLSFKALYEILPLMEKGKRYDEACNELGLKAKTSNQKSEFLPAFCDSIFAQELTNPIVNRAISEYRKVLNRLLKKYGKMHKIHIELARDAGLSKEARNKIEKEQKENKDINDKAEKTCKEFGLKPNAKNILKIKLWREQGEICAYSGKKITIDDLKEDKALEVDHIYPYSRSYDDSYNNKVLVFIKENQLKLNQTPYEAFGSNQEKWSKIQVLAQKLPYKKKNRILDENFKNKDQIEFISRNLNDTRYATSLIAKYTKEYLEFLPLSDDEDISLKSGEKGSKTHVQTMNGMLTSVLRHAWGFSQKDRNNHLHHALDAIIIAYSTNSIIKAFSDFKKNQEILKAKLYAKKLTSEEYKNQSKFTGFEKYRSKILEKLDSIFVSKPPNKNTKGALHEQTFYSYQDILEEYKTQEGLKRALECGKVRKIGTKYVVNDRMVRLDIFKKDNKFYGIPIYTMDFALGVLPNKVVTIGTDKDKIKKEWKTIDETYEFCFSLYKGDLVLIQKKEMQESEFAYYNGFDISSASISLEKHDNKFENLTENQKLLFPKAKEGDVEVRGIGIQGLKVFKKYMVTPLGEIQETRTEARQNIQPRKKHGLR

SEQ ID NO: 122 - protein, 1397 aa, gamma proteobacterium
MTKNYISPIAIDLGAKFTGVALYQYLEGADCTQEVAKGLLVDDRGNVTWSQEGRRGKRHQVRGYKRRKMAKRLLWLILDSEYGIKREEVTEPLLKFINGLLNRRGYTYISEEVDEESMNVSPLPFSEMMPDYFNSSAPLLEQLAKLLSDKNKLVRFRAEGKIPSNKNEFKKLLDTALDGKYKDEKKELSEAWGNILIASENVLKSTVDGHKSRSEYLANIKEDIKSNEELEKQISSKEIDGFYNLVGHLSNFQLRLLRKYFNDPNMSGVSYWDEKRLEKYFYQWVQGWHTKGGTDEAEKKNIILKTKGAPLLKTLKSLSADLTIPPYEDQNNRRPPKCQSVLLSDEKLTMHYPKWKEWVGQLVKQNDNAYLNENVTLANALHRIVERSRSIDPYQLRLLISITDAEKRNDLAGYKRLKLSLGSEVDEFLLLVKNIVDETKEAREGLWFETENKLFFKCGKTPPRKEKLKSTLLSAVLGKNLSDDEQSSFIEEFWKSGTPKIERRNVRGWCRLASQVQKTYGVYLKEYGLQQLHKLEAGKKLDDKPLALLYKNSGLIASKIGEALNIEPDEVSRFASPHSLAQIFNIIEGDVAGFNKTCRACTYENIWRMQEEKVESLLTNQLLSEIHGERKVPLKSAMCTRLSADSTRPFDGQMASIIEHIARKIAQHKIAQINDVPKEFSIDIPIIIESNQFSFTAELEEIKRGRGSAKAKKAKELGEKSKAGWVSKTERIKTSSEGICPYTGAPLGGSGEIDHIIPRSLTGRTKKTVFNSEANLIYCSSKGNHDKGNRVYVIEQLNDKYLKKQFSTSDVNLIKKKIKTTIQRFTEGGEKLRSFSELSREDQKAFRHALFVPELKSEVTSLLAVKNITRVNGTQAWLAKKIASLLAEHLDKQGRDYTLSAHQIDPWSVSKQRKMLASAEPIWAKKDPQPAASHVVDAVCTFLEALEQPHTASRLKTISSTSFEKTGWRSALIPDLIKVDALDRRPKYRRYNIGSTSLFKDGIYAERFLPILIDENGLMAGYDIDNSLKAKGADVVFESLSPFLLFKGEEVGAQSLSDWQERIDGRYLYMSIDKVKAFDYLQEKVGEKDIAAELLNSIHFTQRKTELRAKFSDDSGKKMKTLDAIRKSLKLTVTVNEIGKRKEKCGFSGTIGIPAKSAWENLLDEPLLETYWGTKMPPQEIWEKVYRKHFPRNIPNQAHRKVRKDFSLPVVDSVSGGFRVKRKTPNGYNYQLLAIDGYSAVGFKKEGDNVDFKSPALVPQIAESKSVTPISSELVHLDKNEIVYFDEWRKIDISDSDLKQFVSSLELAPGSQNRFYIRFTVDEDQFERHFKSALRVNGIQDLDTVNKTFDWNREIPSLLIPPRSNLFLLETGQKITFEYIANGANAEVKKAYSLRRA

SEQ ID NO: 123 - protein, 1082 aa, Neisseria meningitidis
MAAFKPNPINYILGLDIGIASVGWAMVEIDEEENPIRLIDLGVRVFERAEVPKTGDSLAMVRRLARSVRRLTRRRAHRLLRARRLLKREGVLQAADFDENGLIKSLPNTPWQLRAAALDRKLTPLEWSAVLLHLIKHRGYLSQRKNEGETADKELGALLKGVADNAHALQTGDFRTPAELALNKFEKESGHIRNQRGDYSHTFSRKDLQAELILLFEKQKEFGNPHISGGLKEGIETLLMTQRPALSGDAVQKMLGHCTFEPAEPKAAKNTYTAERFIWLTKLNNLRILEQGSERPLTDTERATLMDEPYRKSKLTYAQARKLLGLEDTAFFKGLRYGKDNAEASTLMEMKAYHAISRALEKEGLKDKKSPLNLSPELQDEIGTAFSLFKTDEDITGRLKDRIQPEILEALLKHISFDKFVQISLKALRRIVPLMEQGKRYDEACAEIYGDHYGKKNTEEKIYLPPIPADEIRNPVVLRALSQARKVINGVVRRYGSPARIHIETAREVGKSFKDRKEIEKRQEENRKDREKAAAKFREYFPNFVGEPKSKDILKLRLYEQQHGKCLYSGKEINLGRLNEKGYVEIDHALPFSRTWDDSFNNKVLVLGSENQNKGNQTPYEYFNGKDNSREWQEFKARVETSRFPRSKKQRILLQKFDEDGFKERNLNDTRYVNRFLCQFVADRMRLTGKGKKRVFASNGQITNLLRGFWGLRKVRAENDRHHALDAVVVACSTVAMQQKITRFVRYKEMNAFDGKTIDKETGEVLHQKTHFPQPWEFFAQEVMIRVFGKPDGKPEFEEADTPEKLRTLLAEKLSSRPEAVHEYVTPLFVSRAPNRKMSGQGHMETVKSAKRLDEGVSVLRVPLTQLKLKDLEKMVNREREPKLYEALKARLEAHKDDPAKAFAEPFYKYDKAGNRTQQVKAVRVEQVQKTGVWVRNHNGIADNATMVRVDVFEKGDKYYLVPIYSWQVAKGILPDRAVVQGKDEEDWQLIDDSFNFKFSLHPNDLVEVITKKARMFGYFASCHRGTGNINIRIHDLDHKIGKNGILEGIGVKTALSFQKYQIDELGKEIRPCRLKKRPPVR

SEQ ID NO: 124 - protein, 1334 aa, Listeria monocytogenes
MKKPYTIGLDIGTNSVGWAVLTDQYDLVKRKMKISGDSEKKQIKKNFWGVRLFEKGETAAKRRMSRTARRRIERRRNRISYLQEIFAIQMNEVDDNFFNRLKESFYAESDKKYNRHPFFGTVEEEVAYYKDFPTIYHLRKELIDSQKKADLRLVYLALAHIIKYRGHFLIEGALDTKNTSIDEMFKQFLQIYNQVFANDIEEASLKKTEKNQEVAQILAEKFTRKDKLDKILSLYPGEKTTGVFAQFVNIIVGSTGKFKKHFNLHEKKDINCAEDTYDTDLESLLAIIGDEFAEVFVAAKNAYNAVVLSNIITVTDSTTRAKLSASLIERFENHKEDLKKMKRFVRTYLPEKYDEIFDDTEKHGYAGYISGKTKQADFYKYMKATLEKIEGADYFIAKIEEENFLRKQRTFDNGVIPHQLHLEELEAILHQQAKYYPFLREDYEKIKSLVTFRIPYFVGPLAKGQSEFAWLTRKADGEIRPWNIEEKVDFGKSAVDFIEKMTNKDTYLPKENVLPKHSLCYQKYMVYNELTKVRYIDDQGKTNYFSGQEKQQIFNDLFKQKRKVKKKDLELFLRNINQIESPTIEGLEDSFNASYATYHDLLKVGMKQEILDNPLNTEMLEDIVKILTVFEDKRMIKEQLQQFSDVLDGTVLKKLERRHYTGWGRLSAKLLVGIRDKQSHLTILDYLMNDDGLNRNLMQLINDSNLSFKSIIEKEQVSTTDKDLQSIVAELAGSPAIKKGILQSLKIVDELVSVMGYPPQTIVVEMARENQTTNKGKNNSKPRYKSLEKAIKEFGSQILKEHPTDNQELKNNRLYLYYLQNGKDMYTGQELDIHNLSNYDIDHIVPQSFITDNSVDNLVLTSSAGNREKGDNVPPLEIVQKRKIFWEKLYQGNLMSKRKFDYLTKAERGGLTEADKARFIHRQLVETRQITKNVANILHQRFNYKTDGNKDTMETVRIVTLKSALVSQFRKQFQFYKVREVNDYHHAHDAYLNGVVANTLLKVYPQLEPEFVYGEYHQFGWFKANKATAKKQFYTNIMLFFAQKDRIIDENGEILWDKRYLETVKKVLGYRQMNIVKKTEIQKGEFSNVTPNPKGKSNKLIPRKKDWDPIKYGGFDGSKMAYAIIIEYEKQKRKVRIEKKLIQINIMEREAFEKDEKTFLEEKGYHQPKVLIKVPKYTLYECKNGRRRMLGSANEAHKGNQMLLPNHLMALLYHAEKYEAIDGESLAYIEVHRALFDELLAYISEFARKYTLSNDRLDEINMLYERNKDGDVKSIAESFVSLKKFNAFGVHQDFSFFGTKIERKRDRKLNELLNSTIIYQSITGLYESRKRLDN

SEQ ID NO: 125 - protein, 1337 aa, Enterococcus faecalis
MKKDYVIGLDIGTNSVGWAVMTEDYQLVKKKMPIYGNTEKKKIKKNFWGVRLFEEGHTAEDRRLKRTARRRISRRRNRLRYLQAFFEEAMTALDENFFARLQESFLVPEDKKWHRHPIFAKLEDEVAYHETYPTIYHLRKKLADSSEQADLRLIYLALAHIVKYRGHFLIEGKLSTENISVKEQFQQFMIIYNQTFVNGESRLVSAPLPESVLIEEELTEKASRTKKSEKVLQQFPQEKANGLFGQFLKLMVGNKADFKKVFGLEEEAKITYASESYEEDLEGILAKVGDEYSDVFLAAKNVYDAVELSTILADSDKKSHAKLSSSMIVRFTEHQEDLKKFKRFIRENCPDEYDNLFKNEQKDGYAGYIAHAGKVSQLKFYQYVKKIIQDIAGAEYFLEKIAQENFLRKQRTFDNGVIPHQIHLAELQAIIHRQAAYYPFLKENQEKIEQLVTFRIPYYIGPLSKGDASTFAWLKRQSEEPIRPWNLQETVDLDQSATAFIERMTNFDTYLSSEKVLPKHSLLYEKFMVFNELTKISYTDDRGIKANFSGKEKEKIFDYLFKTRRKVKKKDIIQFYRNEYNTEIVTLSGLEEDQFNASFSTYQDLLKCGLTRAELDHPDNAEKLEDIIKILTIFEDRQRIRTQLSTFKGQFSAEVLKKLERKHYTGWGRLSKKLINGIYDKESGKTILGYLIKDDGVSKHYNRNFMQLINDSQLSFKNAIQKAQSSEHEETLSETVNELAGSPAIKKGIYQSLKIVDELVAIMGYAPKRIVVEMARENQTTSTGKRRSIQRLKIVEKAMAEIGSNLLKEQPTTNEQLRDTRLFLYYMQNGKDMYTGDELSLHRLSHYDIDHIIPQSFMKDDSLDNLVLVGSTENRGKSDDVPSKEVVKDMKAYWEKLYAAGLISQRKFQRLTKGEQGGLTLEDKAHFIQRQLVETRQITKNVAGILDQRYNANSKEKKVQIITLKASLTSQFRSIFGLYKVREVNDYHHGQDAYLNCVVATTLLKVYPNLAPEFVYGEYPKFQAFKENKATAKAIIYTNLLRFFTEDEPRFTKDGEILWSNSYLKTIKKELNYHQMNIVKKVEVQKGGFSKESIKPKGPSNKLIPVKNGLDPQKYGGFDSPVVAYTVLFTHEKGKKPLIKQEILGITIMEKTRFEQNPILFLEEKGFLRPRVLMKLPKYTLYEFPEGRRRLLASAKEAQKGNQMVLPEHLLTLLYHAKQCLLPNQSESLAYVEQHQPEFQEILERVVDFAEVHTLAKSKVQQIVKLFEANQTADVKEIAASFIQLMQFNAMGAPSTFKFFQKDIERARYTSIKEIFDATIIYQSTTGLYETRRKVVD

SEQ ID NO: 126 - protein, 1426 aa, Capnocytophaga ochracea
MKNILGLDLGTTSIGFAHIVEDENKEKSEIKELGVRIVSLTTDEQSDFEKGKSITTNANRTLKHGARLNLDRYQQRRKYLIDLLQKANLITPSSILAENGKNTTHSTWQLRAKAVTERIEKEEFARILLAINKKRGYKSSRKAKTEDEGQAIDGMAIAKRLYDENLTPGQLSLQLLQQNKKLLPDFYRSDLQKEFDLVWNFQKQFYPDILTDIFYKELQGKGKDATSKAFSKRYHFDTTENKGSKESVRLQAYQWRAEAISKQLSKEEVAYVLTEINNNLNNASGYLGAISDRSKELYFNRQTVGQYLYAKLQENRHNSLKNKVFYRQDYLDEFERIWETQASFHKELTDELKKQIRDVVIFYQRKPKSQKGLISFCEFESKEIEIEKDGKTITKNIGARVVPKSSPLFQEFKIWQILNNVICKRKGIRKKKISAKTTQLDLLNESSQTIFSLDMECKQLLFDELNLKGDLKSDKVLKLLGYSPQEWEINYNQLEGNRTQKALYEAYLKIVEMEAHDVKDILQIKSAKDDWSLDESPLSASEIREKVKAIFQTLGICTKILYFDPLLPVKEFEEQDSYQLWHLLYSYESDDSTSGNETLYRILEKKYAFKREHARILANVALQDDYGSLSTKAIRKIYPNIKENQYSTACEKAGYKHSKLSLTTEELEARELKNIIPLLKKNALRNPVVEKILNQMINVVNALIEKNSERDAEGKITKYFHFDEIRIELARELKKNAQKRYEMTQNINKAKLEHQKISEILQKEFGIKNPTKSDIIRYRLYQELEHNGYKELYTNAPIARDMLFSKNIEIEHIVPKARVFDDSFSNKTLTFHRINSDKGEYTAFDYITSLNSEEELNQYLTRVENAYKTKSISPTKYKNLLKKASEIGDDFINRDLRDTQYIAKKAKEILFQVTKNVLSTSGSITDRLREDWGLVDVMKELNMPKYQSLGLTEVEERKDGNKVTVIKNWTKRNDHRHHAMDALTVAFTKPSYIQYLNHLNARKDENNKNYSVILAIEEKETIKVPTNNGKNKRVFIEPIPNFRQVAKKHLEEIFISHKAKNKVVTKNTNKPAGTDKQQITLTPRGQLHKETIYGKYQYYINKEEKIGVKFDERTIAKVSNPVYREALLKRLQANDNDPKKAFAGKNALSKNPIYLDESKTKTLPEKVNLTYLEEDFSIRKDISPDNFKDLKSIEKVIDQGVKRILIKRLQAYDNDPKKAFVDLEKNPIWLNKEKGIAIKRVTISGVNNAQPLHIGKDHLGKTTLNKEGKEIPVDYVSTGNNHHVAIYRDKEGNLQEQIVSFFDAVVRAQQGIPIIDKTYKQAEGWQFLFTMKQNEMFVFPNATTGFNPAEIDLLDPKNKKLISPNLFRVQKIATKDYFFRHHLETNVETDNILKNVTWKREGLSGLKDIVKVRINHLGDIVSIGEY

SEQ ID NO: 127 - protein, 1424 aa, Parabacteroides sp.
MKRILGLDLGTNSIGWALVNEAETDEEVSSIIRLGVRVNPLTVDETQNFEKGKSITTNAERTLKRSMRRNLQRYKLRRDALVEFLKELGFITDETILSEQGNRTTFETCRLRAKAAEEEISLEELSRVLLMINKKRGYKSSRKVKKEEDGVLIDGMEIAKKLYEEDLTPGQLCSQLLESGKKVLPDFYRSDLQEELDRIWSVQKQFHPDVFCDAAKEEIKGKNRSQTWAILANYFVWKEEVVGWNDREAKNETIEKECKLVGLKRTTKGYELKKENYRWRAQALTEQLGLEEIAVVLQEINGQINASSGYLGAISDRSKVLYFNHQTVGQYQMAELDKNPHASLRNMVFYRQDYLDEFDRIWEKQAEFHKELTAELKKEIRDMIIFYQRRLKSQKGLISFCEFERLEIVVEKDGKKQTKVIGCKVIPRSHPLFQEFKVWQTLNDIKVLGREKKRNALSASESRALYPEEKEILARELAIKENMKKADVLKLLFENPQELDLNFKQIDGNRTGFSLFSAYSKMIEKYGYEPLDFKKPADEIIGQLRTIFTDLGWNTNLFTIDLTKEGKELEMQPYFRLWHLLYSFEGDNTSTGNGKLIEKIMQLCGVEKEYAVELASLSFQDDYGSLSAKAIKRILPYLKEGNLYDVACEYAGYRHSKSSLTKEEIENKVLKGKLEVLPKNSLRNPVVEKILSQMVNVINTIIDTYGKPDEIRVELARELKKSAKEREELTKAIAKSTREHEEIRKLLQDEFGMMNVSRNDIIRYKLYEELKDNGYKTLYSNQYIPKEKIFSKEIDIEHIIPQSRLFDDSLSNKTLEYKAINIEKGNKTAYDFVKEKYGEEGLQQYINRCESLFNDKKAKLRKLKMEQKDIPDGFIDRDLRNTQYIAKKALAMLNEICRRVVATTGSITDQLREDWQLVDVMKELNLPKYEALGFVETYEDKDGRKIKRIKDWTKRNDHRHHAMDALTVAFTKDAFIQYFNNKNAAQDSGNRNHTNIIGIKTRYFDKGRALPPIPLEQFRIEAKQHLEKLLVSIKAKNKVVTVNVNRTKKRKGENTKIQQTPRGQLHLETVYGSHKQYVTKIEKVNASFDAAKIATVSKRAYRNALLKRLETFGNDPKKAFTGKNALEKNPLYADKYQTIRVPEKVQTVEFETIYTIRKPVDPALNVDKVVDVKVRAILERRLKEYGGDPKKAFVNFWENPIWLNKEKGISIKRVSIRGINNAQSIHVKKDKNGNPIWDENGKQIPVDFVNTGNNHHVAIYRKPVLDKKGQVTFDEDGNLMYELDEVVVPFFEAVTRANLGLPIIDKDYRKSEGWQFLFSMKQNEYFVFPNEKTGFNPKEVDLLNPDNYAMISPNLFRVQTMSKVMYGNNVVRDYKFRHHLETTVKDMKELKDIAYKQYKTLSFGNSVVKIRINHIGQIVSVGEY

SEQ ID NO: 128 - protein, 1395 aa, Lactobacillus jensenii
MKEIKDYIIGLDIGTNSCGYVVTDKQNNILKLKGKTAIGARLFKEGQAAADRRSFRTTRRRLARRHWRLGLLEEIFDPEMEKIDPNFFRRLKESDYSPKDSRKQFNAIVFKSIKADKRFYKKYPTIYHLRNALMHDNQKHDLREIFMAVHHIVKYRGNFLREDSVNAFKAAKFSLRGEDGIGPVDKLNDLLKEIYSEYSPELATNNLSKIEDIIKDKNLYKQDKLKQVATLLIKEADSKDKAKLNKDIAKQVANSFMGYMFRLDTLFSLTDVDVKDYKLKFSDANIDESLDDLTSLLTDAQIEFVLELQSIYNTIVLNEIVPDGMSLSESMIKKYDDHKEDLKIFKEYIDSLSDQKKAKKLLSAYNLYVNYRKSDLVEAKNLFKNKKVGDKNFADVISNFEVFGKFVSDNLDDSELANKIKARLDLGEFLPKQRTNQNGVIPYQLHQVELTQILEKQGKYYPFLITPNPVESHRNNAPYEISELVSFRVPYYVGPLIDNQSIKDKQNKNKFAWMVRQKQGQITPWNLEEMVDTTESANQFIKRMTRKDTYLLAEDVLPKSSLVYQKFMILDELNRIKIDGKKLTSELKHDIFEKLFKKQKSINLDNLKNYLLVEGNIPGLIEGLSDGINFNNSFSTYIDYRNIFGDEIDNPNKQADFEKMIEWSTVFEDRKIFKRKLKEITWLTSEQIKQVSSKRYSGWGRLSKKLLTQITDENGVNILQRLWNEPETLTEVLANPVIKRKIVEANSSFTKAKDMKDILVEAYTSPQNKKAIRQVMRVVDDIIAAAHGKKPSQIAIEFAREDQDNPQMTKSRKAQLDQIYAKISDEFLDDAVKNELKNMKDNKPLAKDKVFLYFKQMGRDAYSGEKLSLDNLQDYDIDHIYPQSFIKDDSFDNRVLVQRAYNNGKSDNVPVLLFGNKIAAGLGITIRQMWKKWLELGLISKRKFNNLITDPEKISRNMASGFVNRQLVETSQVIKLVANILQAKLPDTEIIEVKASYNSILRKEFNLYKSREVNDYHHAIDAYLTTIVGNYLYQVYPKLRPYFVYGQFKKFGKAENQEDDPVKKIKKFNFIYQLIWGKDDAICISHTNQQVFSKKDIIDKLTTAYNFKYMNISHAVYTRNNNMFKQTLFPIIERTTAKTKSLIPKKLDRPTDIYGGYSNNNDAYLALVKVDKKRGSEYRVVGIPMRAAAMLKASKNYDEDLRKVIEPMVMFDKNGKAKRGIEGFRVLVGKMPFKQAVLDGNKKFMLTGTVDTPNLKQLVLSQQNMKYILDYIEDVDCRKHKFGDKVQNPDKCLLEVFDEIIEIVDKYFELFDSRDFREKLRNSRNKFIKLEASKKADTILAILKGLQAKSTRATIKELNISDFGRIITSSISPEAQLIYQSPTGLFERRVKVKDL

SEQ ID NO: 129 - protein, 1140 aa, Roseburia intestinalis
MRENGSDERRRNMDEKMDYRIGLDIGIASVGWAVLQNNSDDEPVRIVDLGVRIFDTAEIPKTGESLAGPRRAARTTRRRLRRRKHRLDRIKWLFENQGLINIDDFLKRYNMAGLPDVYQLRYEALDRKLTDEELAQVLLHIAKHRGFRSTRKAETAAKENGAVLKATDENQKRMQEKGYRTVGEMIYLDEAFRTGCSWSEKGYILTPRNKAENYQHTMLRAMLVEEVKEIFSSQRRLGNEKATEELEEKYLEIMTSQRSFDLGPGMQPDGKPSPYAMEGFSDRVGKCTFLGDQGELRGAKGTYTAEYFVALQKINHTKLVNQDGETRNFTEEERRALTLLLFTQKEVKYAAVRKKLGLPEDILFYNLNYKKAATKEEQQKENQNTEKAKFIGMPYYHDYKKCLEERVKYLTENEVRDLFDEIGMILTCYKNDDSRTERLAKLGLVPIEMEGLLAYTPTKFQHLSMKAMRNIIPFLEKGMTYDKACEEAGYDFKADSKGTKQKLLTGENVNQTINEITNPVVKRSVSQTVKVINAIIRTYGSPQAINIELAREMSKTFEERRKIKGDMEKRQKNNEDVKKQIQELGKLSPTGQDILKYRLWQEQQGICMYSGKTIPLEELFKPGYDIDHILPYSITFDDSFRNKVLVTSQENRQKGNRTPYEYMGNDEQRWNEFETRVKTTIRDYKKQQKLLKKHFSEEERSEFKERNLTDTKYITTVIYNMIRQNLEMAPLNRPEKKKQVRAVNGAITAYLRKRWGLPQKNRETDTHHAMDAVVIACCTDGMIQKISRYTKVRERCYSKGTEFVDAETGEIFRPEDYSRAEWDEIFGVHIPKPWETFRAELDVRMGDDPKGFLDTHSDVALELDYPEYIYENLRPIFVSRMPNHKVTGAAHADTIRSPRHFKDEGIVLTKTALTDLKLDKDGEIDGYYNPQSDLLLYEALKKQLLLYGNDAKKAFAQDFHKPKADGTEGPVVRKVKIQKKQTMGVFVDSGNGIAENGGMVRIDVFRVNGKYYFVPVYTADVVKKVLPNRASTAHKPYGEWKVMEDKDFLFSLYSRDLIHIKSKKDIPIKMVNGGMEGIKETYAYYIGADISAANIQGIAHDSRYKFRGLGIQSLDVLEKCQIDVLGHVSVVRSEKRMGFS

SEQ ID NO: 130 - protein, 992 aa, Treponema vincentii
MQKNSGEDENCGFEFLTEEEKELIKPLFFRISKPSFQFADIEKKLKGKNGFWKFNYRKDTNVSGCPVSAGLKNIFGDEASAESWKDKKVGQYDMCDIWHVLFDFDDEEKLLEFAKRKLFLSDEAAKKFCAIRIQQGYANLSLKAIRKITPFLRKGYIYSTAVFLANIPFMIGRDIFLQNEKEIEDSVKNIIGTLRDKNNIIVLANRCIESAFKDKDNDFRFEEWDKALVENSAWDLFGKKKWNEYDEEKRKTIISQVSEKVEDNLKIAVGKNPNDYKYPLLRTDDLIMDYLNQKGFVVKGELYHPSDTDYNFETPVPAEDGKIYLASPRSPSVKNPVVMRALHQLRKLVNYLIKTGKIDSTTKINVELANDVNDKNQRKAIEELAKTNEKNNADARKKIEELCNEAGFKVVPTESDIKKFRLWKEQNETCPYTGKHISFTDLFGPIPKFDFEHTIPRSLSYDDSLENLTLCDSEFNRNIKKQRLPSELPDFEEINKRFLKFYEDKIDNCLRIIELNSKSGGSYEEPAVKDLRIVKKHKAQYELNYYKEKLRRFSSTEITSGFKHSQLNDTRIITKFSLSYLKGVFDHVQPVKGSMTDTFKRQWGLMERNEIKDRSNHTHHTVDALTVACINRGKFNLLSEAIKNSSDGKHLKFPKPWETFDTDVLNAVRYIIPKYFSDESSLRQSKKILRGRDGKPVLKNGKAVFIQGATARGSLHKDTFYGCIKTVPEKGGKSEMIFVQRIPVSTLDEKVAEKIIDKRIRKTFEKNLSTGIQTLQEIQTDGILLPFKKEGRDVFVKRVRIKAHPTSPIILKKHHNVINKNPKDYKQNYYVENEENYLLAIYRGKDAKGKDVSDHKLCNLLNAVKSRQNKTGFYPDFKEKKGINLQLYKVLKIGKIVILQNDIQEDVFALPKEKLWKRMYRIAGLATSRNDIQIKLVHIIRETPWGYMKGEKDLNAGKECLLYGTANFKGLVEGQDFTVSPAGEIIQKARVC

SEQ ID NO: 131 - protein, 1340 aa, Enterococcus faecium
MKKEYTIGLDIGTNSVGWSVLTDDYRLVSKKMKVAGNTEKSSTKKNFWGVRLFDEGQTAEARRSKRTARRRLARRRQRILELQKIFAPEILKIDEHFFARLNESFLVPDEKKQSRHPVFATIKQEKSYHQTYPTIYHLRQALADSSEKADIRLVYLAMAHLLKYRGHFLIEGELNTENSSVTETFRQFLSTYNQQFSEAGDKQTEKLDEAVDCSFVFTEKMSKTKKAETLLKYFPHEKSNGYLSQFIKLMVGNQGNFKNVFGLEEEAKLQFSKETYEEDLEELLEKIGDDYIDLFVQAKNVYDAVLLSEILSDSTKNTRAKLSAGMIRRYDAHKEDLVLLKRFVKENLPKKYRAFFGDNSVNGYAGYIEGHATQEAFYKFVKKELTGIRGSEVFLTKIEQENFLRKQRTFDNGVIPHQIHLSELRAIIANQKKHYPFLKEEQEKLESLLTFKIPYYVGPLAKKQENSPFAWLIRKSEEKIKPWNLPEIVDMEGSAVRFIERMINTDMYMPHNKVLPKNSLLYQKFSIYNELTKVRYQDERGQMNYFSSIEKKEIFHELFEKNRKVTKKDLQEFLYLKYDIKHAELSGIEKAFNASYTTYHDFLTMSENKREMKQWLEDPELASMFEEIIKTLTVFEDREMIKTRLSHHEATLGKHIIKKLTKKHYTGWGRLSKELIQGIRDKQSNKTILDYLINDDDFPHHRNRNFMQLINDDSLSFKKEIKKAQMITDTENLEEIVKELTGSPAIKKGILQSLKIVDEIVGIMGYEPANIVVEMARENQTTGRGLKSSRPRLKALEESLKDFGSQLLKEYPTDNSSLQKDRLYLYYLQNGRDMYTGAPLDIHRLSDYDIDHIIPRSFTTDNSIDNKVLVSSKENRLKKDDVPSEKVVKKMRSFWYDLYSSKLISKRKLDNLTKIKLTEEDKAGFIKRQLVETRQITKHVAGILHHRFNKAEDTNDPIRKVRIITLKSALVSQFRNRFGIYKVREINEYHHAHDAYLNGVVALALLKKYPQLAPEFVYGEYLKFNAHKANKATVKKEFYSNIMKFFESDTPVCDENGEIFWDKSKSIAQVKKVINHHHMNIVKKTEIQKGGFSKETVEPKKDSSKLLPRKNNWDPAKYGGLGSPNVAYTVAFTYEKGKARKRTNALEGITIMEREAFEQSPVLFLKNKGYEQAEIEMKLPKYALFELENGRKRMVASNKEAQKANSFLLPEHLVTLLYHAKQYDEISHKESFDYVNEHHKEFSEVFARVLEFAGKYTLAEKNIEKLEKIYKENQTDDLAKLASSFVNLMQFNAMGAPADFKFFDVTIPRKRYTSLTEIWQSTIIHQSITGLYETRIRMGK

SEQ ID NO: 132 - protein, 1363 aa, Lactobacillus rhamnosus
MTKLNQPYGIGLDIGSNSIGFAVVDANSHLLRLKGETAIGARLFREGQSAADRRGSRTTRRRLSRTRWRLSFLRDFFAPHITKIDPDFFLRQKYSEISPKDKDRFKYEKRLFNDRTDAEFYEDYPSMYHLRLHLMTHTHKADPREIFLAIHHILKSRGHFLTPGAAKDFNTDKVDLEDIFPALTEAYAQVYPDLELTFDLAKADDFKAKLLDEQATPSDTQKALVNLLLSSDGEKEIVKKRKQVLTEFAKAITGLKTKFNLALGTEVDEADASNWQFSMGQLDDKWSNIETSMTDQGTEIFEQIQELYRARLLNGIVPAGMSLSQAKVADYGQHKEDLELFKTYLKKLNDHELAKTIRGLYDRYINGDDAKPFLREDFVKALTKEVTAHPNEVSEQLLNRMGQANFMLKQRTKANGAIPIQLQQRELDQIIANQSKYYDWLAAPNPVEAHRWKMPYQLDELLNFHIPYYVGPLITPKQQAESGENVFAWMVRKDPSGNITPYNFDEKVDREASANTFIQRMKTTDTYLIGEDVLPKQSLLYQKYEVLNELNNVRINNECLGTDQKQRLIREVFERHSSVTIKQVADNLVAHGDFARRPEIRGLADEKRFLSSLSTYHQLKEILHEAIDDPTKLLDIENIITWSTVFEDHTIFETKLAEIEWLDPKKINELSGIRYRGWGQFSRKLLDGLKLGNGHTVIQELMLSNHNLMQILADETLKETMTELNQDKLKTDDIEDVINDAYTSPSNKKALRQVLRVVEDIKHAANGQDPSWLFIETADGTGTAGKRTQSRQKQIQTVYANAAQELIDSAVRGELEDKIADKASFTDRLVLYFMQGGRDIYTGAPLNIDQLSHYDIDHILPQSLIKDDSLDNRVLVNATINREKNNVFASTLFAGKMKATWRKWHEAGLISGRKLRNLMLRPDEIDKFAKGFVARQLVETRQIIKLTEQIAAAQYPNTKIIAVKAGLSHQLREELDFPKNRDVNHYHHAFDAFLAARIGTYLLKRYPKLAPFFTYGEFAKVDVKKFREFNFIGALTHAKKNIIAKDTGEIVWDKERDIRELDRIYNFKRMLITHEVYFETADLFKQTIYAAKDSKERGGSKQLIPKKQGYPTQVYGGYTQESGSYNALVRVAEADTTAYQVIKISAQNASKIASANLKSREKGKQLLNEIVVKQLAKRRKNWKPSANSFKIVIPRFGMGTLFQNAKYGLFMVNSDTYYRNYQELWLSRENQKLLKKLFSIKYEKTQMNHDALQVYKAIIDQVEKFFKLYDINQFRAKLSDAIERFEKLPINTDGNKIGKTETLRQILIGLQANGTRSNVKNLGIKTDLGLLQVGSGIKLDKDTQIVYQSPSGLFKRRIPLADL

SEQ ID NO: 133 - protein, 1234 aa, Prevotella tannerae
MPNFWSIFTENLQTYLMKTRILGLDTGTNSLGWAVVDRDENNQYTPICRGDLIFTEGVKQEKGIEFSLAAERTSYRASRRHYFRRRLRKVEVLKVLVKHKLCPPLSDEALNRWHTKKEYPLDEDFILWQRTNEADNKNPYHDRHICLHRKLNLKDSQTDRYTLGRALYHLTQRRGFLSNRLDQNEEAEETGKVKSAISELSKEMKEAGCEFLGDYFYLLYRTEGNRVRIRSRYTDREKHYLQEFKEICRVQELDEDLAKALEKTIFFQRPLKSQRQGVGKCTMEKGHSRCAVSHPLYEEYRLLCYLNNIRIKTPSDDRLRPLNAEEREKITPLFYKEKNFDFEKIAKKLAGKTPFGWIRDAEDWPYQFNYRMTQEAPACPTTAQLIKVFGEDWKAALAETYTMSAKQDGTLKTEDEICTDIWNVLYSFSSKEKLKEFGLKKLQLDEVQAKAFSEIRLTRDFASLSLKAIRKILFFLRTGEDYSKAIFLANIPTIVGEEIWNDIERRSRLLYKVDLALRPQEERDAEEHRTIAERIKAAVAAEVPDAPIDLLYHPSMIEAYPDAKRNERFDCYQLGSPKTNAVRNPMAMRSLHMVRKVINHLLRKHIIDEKTEIHIEYARELNDANKRQAIADWQRELSKRHTAYAQNIRQLYKAETGLVIEPTKADILKYQLWEEQQHVCLYTGKKIGIADFLGANPKFDIEHTIPRSRGGDSTQENLTLCESKFNRDIKRDKLPTELANYEEILARIEHWKKQCYALKLKRDGIRTHSGLEKSIKDSRIRRRHLVGLEYGYLKGKYDRFTMKEVPEGFSRRQGAGIGLISKYAGLFLKSLFKDPKNPNRSNVYVVKGAITAEFRKLWGLQQADEAKSRENHTHHCIDAYTIACIGPCEYAALAAYYRSDEEFKYGRRREKPQFEKPWPTFTEDLLKLQEELLIVHQTTDKLGKRDRRKVKTPRGKFLTGGDSARGRLHQETYYGAINYDGNIKYVVRKPLDSLTEKDLDKIVDETVMGIVKGAVEAKGSLKEALADGIYMNKEKGILIKRVRIFSDVSEPINLKQLRDVSTKEYKRHIHLRKDENYLFAIYEGIDKKKNKKQTETATVDYLDAAKFYKDSKRRDKANSLVGDYSKKNKLPLKCILKKRQMVLFYEHSPEEIRFKDKKDLSRRLYIVTSIAKDGRVKFLHHQAATATGIQSSPSPFTNDGEHQPYYRLSASNIKVLVAGIDFDINILGEITPKL

SEQ ID NO: 134 - protein, 1496 aa, Prevotella veroralis
MKTILGLDLGTNSIGWAKVCVDDNGNYLRDIKLGSRIIPMSQDVLGNFDKGVTESQTSVRTGFRGVRRIRERSLLRRERLHRVLHVLGYLPPHYDSAIGWNKNEPSTYGKFLNHGEPKLAWEHKEDGSMRFLFMESFHEMMADFAKSQPSLVSDGKKIPLDWTIYYLRKKALSQPIRKEELAWLLLNFNQKRGYYQLRGEEDDDNPTKCEEYYELKVVGIEADEEGKNGNTWYNVKLENGWIYRRQSKIPLDDWIGKVREFIVTTEYEKDGITLKKDKNGDVKRSFRSPSEDDWGLRKKRTEKLLDSSKMTVGAFVYDHLLAEPSDKIRGKFIRTIERKYYKKELYAILCEQSKYHEELRSGDYLNKCAEELYKNNQPHRNSLLTKDLAYLLLEDLIFYQRPLKTKKSLIAECPYEAYKYVDKETGEIKRQGIKCIAKSNPYYQEFRLWQFISNLRLFNKADDKEVTADYLPTQDDYVRLFAYLNDRKEINQETLLKEFFKLKKITVNSEKVFPIRWNYIEDKEKKYPCNETRHELLLALDRARIDHSWLEKPGQEYRLWHLLYSVESKEETKEALRKLKDDDAFVESFLKVKPFKREYGAYSEKAIKKLLAVMRMGSLWRETDICDTTKGNITKILQGEIDEKLKEKISASVSSYNQLSDFQGLPVWLACYVVYGRHSEAAEIQHWKTPESLLAYINGFKQHSLRNPIVEQCILETLRTVHDIWKEVGHIDEIHVELGRNMKSTADQRARISENVLRNENTNLRIKSLLLELKNDPNIKDVRPYSPMQQEKLRIYEEGVLQELTKDDKDFTEITKISTMAQPSAKELQRYKLWLEQKYRSPYTGKSISLTKLFTSAYQIEHVIPQSRYFDDSFSNKVICESEVNSLKDNMLGYEFIKNHGGEIIHCTMLGDVKVLSESEYKAFVNDHYAHNKRKRENLLLEDIPQEFLNRQMNDSRYISKVVKALLSNIVRAEGEEEATSKFVVSCSGGITDRLKKDWGLNDVWNKIVYPRFERLNRLTGTEAFGQWENKDGKRVFQTAVPLELQRGFNKKRIDHRHHAMDALVIACTSRNIINYLNNESANNPKKREDLRQKLCDKNRTIRKPWETFTQDATAALEDVIVSFKNYVRIINKATNYYERYDVEGKKVIAEQRGDDMWAIRKPMHEATYYGRVNLRRKKKVNLRVALENISSICDNKLRIYINGLVEKGFNTKQILDKFKNTNDHFSMQKIDKVEIWQFTNEEEKLVATRKPLDTSFDTKKIASITDTGIQTILLNYLETKGGDSTIAFTPEGIVEMNQNISKYNNGKEHMPILKVRLYTKLGKKIPVGQTGCKAKQFVIAEAGTNLYFAIYEDEEGKRSYRTIPLNEVVERLKQGLSPVPEKNDKDVHLKFYLSPNDLVYVPIEDEHESLAKDHIYKFVDSSGTTANFIPHRSANVIFELNKKDAEKFCSGSIIQNEYGVGSSQSKNQKAITGEMIKAVCRKLEVDRLGNVIKVI

SEQ ID NO: 135 - protein, 1082 aa, Neisseria cinerea
MAAFKPNPMNYILGLDIGIASVGWAIVEIDEEENPIRLIDLGVRVFERAEVPKTGDSLAAARRLARSVRRLTRRRAHRLLRARRLLKREGVLQAADFDENGLIKSLPNTPWQLRAAALDRKLTPLEWSAVLLHLIKHRGYLSQRKNEGETADKELGALLKGVADNTHALQTGDFRTPAELALNKFEKESGHIRNQRGDYSHTFNRKDLQAELNLLFEKQKEFGNPHVSDGLKEGIETLLMTQRPALSGDAVQKMLGHCTFEPTEPKAAKNTYTAERFVWLTKLNNLRILEQGSERPLTDTERATLMDEPYRKSKLTYAQARKLLDLDDTAFFKGLRYGKDNAEASTLMEMKAYHAISRALEKEGLKDKKSPLNLSPELQDEIGTAFSLFKTDEDITGRLKDRVQPEILEALLKHISFDKFVQISLKALRRIVPLMEQGNRYDEACTEIYGDHYGKKNTEEKIYLPPIPADEIRNPVVLRALSQARKVINGVVRRYGSPARIHIETAREVGKSFKDRKEIEKRQEENRKDREKSAAKFREYFPNFVGEPKSKDILKLRLYEQQHGKCLYSGKEINLGRLNEKGYVEIDHALPFSRTWDDSFNNKVLALGSENQNKGNQTPYEYFNGKDNSREWQEFKARVETSRFPRSKKQRILLQKFDEDGFKERNLNDTRYINRFLCQFVADHMLLTGKGKRRVFASNGQITNLLRGFWGLRKVRAENDRHHALDAVVVACSTIAMQQKITRFVRYKEMNAFDGKTIDKETGEVLHQKAHFPQPWEFFAQEVMIRVFGKPDGKPEFEEADTPEKLRTLLAEKLSSRPEAVHKYVTPLFISRAPNRKMSGQGHMETVKSAKRLDEGISVLRVPLTQLKLKDLEKMVNREREPKLYEALKARLEAHKDDPAKAFAEPFYKYDKAGNRTQQVKAVRVEQVQKTGVWVHNHNGIADNATIVRVDVFEKGGKYYLVPIYSWQVAKGILPDRAVVQGKDEEDWTVMDDSFEFKFVLYANDLIKLTAKKNEFLGYFVSLNRATGAIDIRTHDTDSTKGKNGIFQSVGVKTALSFQKYQIDELGKEIRPCRLKKRPPVR

SEQ ID NO: 136 - protein, 1512 aa, Fibrobacter succinogenes
MKKILGLDLGTNSIGWAVVNADEITRDDGSRYLKPNGISAAGSRIIPMSADILGDFEKGNSISQTAERTRMRMARRLHERALLRRERLLRVLNLLDFLPKHFADKIDRYGKFTDDSEPKLAWRKNTEGKYEFIFQDAFNEMLAEFKDKQPEIVEEGKKIPYDWTIYYLRKKALEKALSKEELSWILLQFNQKRGYYQLRGEEEEIPQDKKIEYLAQKVVKVEATDQKKGDDVWYNVYLENGMIYRRTSKAPLDWEGKVKEFIVTTEVENDGETPKKDKEGNIKRSFRAPKEDDWTLLKKKTEADIENSHKTVGCYIYDSLLNNPKQKIIGKLVRTVERKFYKEELTQILKKQVELIPELRDDNLYKQCIEELYPINEAHRNTIAKTDFANLFINDILFYQRPLKSKKSQIDNCPYEERIFIDSKTGEKKKVPVKCIAKSNPLFQEFRLWQFIQNLRIYQREKEIDGKLLTDIDITSECLKSEEDYVRLFDWLNDRETIEQEDLLKHLFNTKKSKNKENPYRWNYVEDKVYPCNETRATILKGFSKCGINASVLSPELEMALWHILYSVEDKKEIETALTHFAQKQGWNDDFAKVFSKAKPFKKDYGSYSEKAIKKLLSLMRMGKYWNQDNIDKNTLDRIDKIINGEYDEKISNRVRDNAINLKDISDFRGLPVWLACYIVYDRHSEAKDCTKWNSPEEIDSYLKKFKQHSLRNPIVEQVVTETLRTVRDIWIQEEQIDEIHLELGRDLKNPADKRKKMSENILKNENTNLRIKAMLMEFMNPSMGIENVRPYSPSQQDILRIYEENALDNLTKDDKDFDFISKISKQAQPSKTDIIRYKCWLEQKYRSPYTGKTISLSKLFTPAYEIEHVIPQSLYFDDSFSNKVICEAEVNKLKDRQLGYKFIAEHHGEKVQLSQGEVVEILSVDAYEKFVKENYANNRIKMKKLLMESIPDEFIERQLNDSRYISKVVKGLLSNIVREKIDDENYEPEAVSKNLISCNGAITDRLKKDWGMNDVWNSIILPRFIRMNQITGKDCFTTTNAEGHLIPQMPLELQKGFNKKRIDHRHHAMDAIVIACTTRDHVNLLNNEAAHSKFNATRYQLQRKLRRFEKAVIDGKEREVAKEFLKPWDSFSSDSKNILENIIVSFKQNQRVINKTTNAFLHFDENGKKTFIKQGKGDSWAIRKSMHKDTVFGEINLRKVRSVSLNEAIKVPERVLNKKIKEKILELKNNKIDAKNIKKYIEENHTGGYGIDSSKIDVFYFTKETKERFFATRKTLDTSFNQAKIKDSIADSGIQKILLAHLKSKNGDAEQAFSPDGIDEMNKNIVELNNGKFHQPILKVRVYEKADKFAVGQKGNKKVKFVEAAKGTNLFFAIFEKDGKRSYLTIPLNVMIDCQKQYGNQWKNNIEAYLKEKELVEKDVKLQFILSPNDLVYLPTEGSIDKKRIYKVVSFTNNRLYAIPYAIAKSIVDKNEFTQLNKIEFTDNKESIKDACVPVIIDRLGNVIEFNGKRL

SEQ ID NO: 137 - protein, 1259 aa, Streptobacillus moniliformis
MKYILGLDLGVASIGWAVTEINEKGEPVGLIDANSVIFKPLDNDKGKLYNVERRDKRGSRRILRRKKHRVERTKMLLVNSSFLTNEEIDNLYVGKLDNIYEVRLKGLKEQLSKNEIARLMIYYCKNRGFKSNRKTEDLEILKSLGEKISEKDSDEKKLKPIIAKNTELIESKGLTPIEVIYMIRENDNSILGFKNKEGNYKFGFKRNQVIDEVRKILGTQQILSKEIVDEYIDILSSQRDFSDGPGGDSKYKIDYTKLAGKCKYTGEVRAVKSAPSYEIFTMLQKLNDIRYVKFTSEDKIEKKKLSKEVIHKLYDLVVEKNKTLTYDLIEKSIDEENIKLLNIPKLSKSKYVELRKSYFKERNDNENLTEEEINAFNEKLNNERMKQELIRNNLKAYKELKSKFKKNNIDENRIKELGGIYFLDLVAELLTYSKTDEKLEYFVENVERYSLFKEQRDIVEIIKTFPNYTKNGNLSLSLVRELNKLLMEGHDYESSLSSLNYYIDTDVDWEKFPTISEIEDSLSTKITNPNVKHILVILRKLYNTLLFKYGRPEKVHLELSRDFSNDFSTRNKIQKEQLENKVRREVAAFEMYGANKDIVAGKDRLSNDDFVRIKLWEEQNKVCMYSGRTIEKYQLTSAEVQIDHILPYSKSFDNSYSNKVLVFSNENQDKKERTPYQWLKGTEKWNEFKQRVRLNLNISNKKKENLLFEDEVVNNEFLERELHATSYSSRLALNIFQRLIPVSDEDKYDEHGNEKVKYLYNRNVIAFQGKMTSMLRNLYSLNKYTHSFESDTLDIDNKAFILKEFEINKDNLKMTAYNVNTGLEITSETKVEKNKSGEFKTIKDELLKKELDKKENLIEISDYFKDKVLFDLKIVDFEEIDTVEPEIISILYKMITALKEEVYSKNRENHLHHSLDAFLLTIMNRSMQMKLIKYNQLISVLKNKEIEIFNEEKGEYIDSKEFAEELQKQKIIDIDGNERGIKFNVNGKTHRLNLVKPYENFLDDIKNKIFDKRENNKLPYHVVKSKVSGALHAETILGESKGEITKRISVFDINYKNLGKIFDKDGSQKEIYETLVKWLEAKSKDYPKLKNGNIIKKVKIVDGNKDKLIKLGNKRYVEMGRTTVKILVLKKEAEEGLKFASIGRYKYNLLKSEKDVNISIWKDAIHFCKVRYNKLKENGYRLIHELIPGETIELELNKGNISKCLVVGFSGGKIEISSVIGDALDLINDKISTRIKERYYITVSTIKSIKKINKNILGD

SEQ ID NO: 138 - protein, 1091 aa, Mobiluncus mulieris
MDSRKYRVGIDVGTNSVGFAAVEEDDSGSPTRFLNTMVVIHDSGVDPEQKKYAITRLASAGTARRTRRLYRTRRQRLRELDDFISNELGYPLVNLENFADPYEPWKVRADLATTKLPNDELPEAMSIALRHMARHRGWRSPYQRVEALHLHAEISKEFAALKERVVEKTGDVFSDDATPAEVLVDLMGRQKVRGADGVLSGKLRQSDNANELRKIASVQGIDDETLNRIIDRVFSSKSPKGKASERVGMDALPGQGSKPRALKAMPSFQKFRVVSVICNLRIKDSGGDARPLSMEEKEKLIDYLMSSTTDDHVTWTDVADLLHVKRSQLQGTAKEGFDGERPYTRPPVNSTWSKIKDSKIKSLVALWKTGDVDVQSAIVEALSNASVLEDSRPGADIVVAYLESLDDKELESLDKVGLPAGRASYSEDSLERLTERMLRDDCDLFEARKREFNVADDWKPPADPIYAPVGNPGVDRVLKIVNRLLMAAEREWGAPTQINIEHVRSGFSSELMQREFERENERRRAQNEEAVKAILTEKGGNSRVSKYDITRYYAVKRQHCQCLYCGTPITFSDCELDHIVPRKGVGSTNTRVNLAAACRSCNRDKSNLPFAVWAGKASNFDVSIDDAVSRVKQWQRSQNEGVREFRAFQNEVISRLLKTTEDPEIDSRSLESVAWMARELHHRVEYYFQSKGAQTQVSVYRGAVTAQARKSSGLEDKVKMIGGGGKTRLDRRHHAMDAATIALMTPGISTTLSEKNNLRDAQKFTGQSETWKDYCGRTETARKHFAVWKSNMERLTDLFNDKLENDAIPVVQPLRLRLSNSKAHDDGIGKLDSKKLGSVWSLADIDRAATPQIWTALTRCDDFDPTKGLPENANRVIRAQGVKYESEDNIPVFPSNVAAIAVRDGYAEIGSTIHHARIYRIDDGKKTFYSMIRVFAVDLLKHQAEDLFTVKLPPSAISIRTCEDSLRRALSNGTAEYLGWLVPGDEIIVDTSDKAFHTGQIGDLLRNFPVNSFRLTGFPSNSRLRLKPVLLAGEGLRDDAEDSIKKILLGQGWRPAINVLFSKGKPRIVRRNSLGIERPSSNNGLPFSWEA

SEQ ID NO: 139 - protein, 872 aa, Candidatus Parvarchaeum
MLGSSRYLRYNLTSFEGKEPFLIMGYYKEYNKELSSKAQKEFNDQISEFNSYYKLGIDLGDKTGIAIVKGNKIILAKTLIDLHSQKLDKRREARRNRRTRLSRKKRLARLRSWVMRQKVGNQRLPDPYKIMHDNKYWSIYNKSNSANKKNWIDLLIHSNSLSADDFVRGLTIIFRKRGYLAFKYLSRLSDKEFEKYIDNLKPPISKYEYDEDLEELSSRVENGEIEEKKFEGLKNKLDKIDKESKDFQVKQREEVKKELEDLVDLFAKSVDNKIDKARWKRELNNLLDKKVRKIRFDNRFILKCKIKGCNKNTPKKEKVRDFELKMVLNNARSDYQISDEDLNSFRNEVINIFQKKENLKKGELKGVTIEDLRKQLNKTFNKAKIKKGIREQIRSIVFEKISGRSKFCKEHLKEFSEKPAPSDRINYGVNSAREQHDFRVLNFIDKKIFKDKLIDPSKLRYITIESPEPETEKLEKGQISEKSFETLKEKLAKETGGIDIYTGEKLKKDFEIEHIFPRARMGPSIRENEVASNLETNKEKADRTPWEWFGQDEKRWSEFEKRVTSLYSKKKISERKREILLNKSNEYPGLNPTELSRIPSTLSDFVESIRKMFVKYGYEEPQTLVQKGKPIIQVVRGRDTQALRWRWHALDSNIIPEKDRKSSFNHAEDAVIAACMPPYYLRQKIFREEAKIKRKVSNKEKEVTRPDMPTKKIAPNWSEFMKTRNEPVIEVIGKVKPSWKNSIMDQTFYKYLLKPFKDNLIKIPNVKNTYKWIGVNGQTDSLSLPSKVLSISNKKVDSSTVLLVHDKKGGKRNWVPKSIGGLLVYITPKDGPKRIVQVKPATQGLLIYRNEDGRVDAVREFINPVIEMYNNG

SEQ ID NO: 140 - protein, 1229 aa, Pediococcus acidilactici
MGDRKYNLGLDIGTSSIGFAAVDENNQPIRVKGKTAIGVRLFEEGKTAADRRGFRTTRRRLSRRRWRINLLNEIFDAHLAEVDPTFLARLKESNRSNLDPKKSFQGSLLFPERKDYQFYEEYPTIYHLRKALMEKDRKFDIREIYLAVHHIIKYRGNFLNGTPMRSFKVENIELNTLFDQLNQLYAEIVPDNELAFDLAQVADVKDVLSSTTIYKMDKKKQLVKMMLLPASNKALQSENKKIVTQFVNAILNYKFKLDVLLQVETDADWSLKLNDEGADDKLEEFTGDLDENRLEIIDLLQRLHNWFSLNEITKDGNSLSAAMVEKYENHHHHLGLLKKVIENHPDAKKAKALKETYTAYVGKTDDKTQNQDDFYKAVEKNLDDSPDAKGIKRLIQLDQFMPKQRTGQNGAIPHQLHQQELDQIIEKQSKYYPFLAEPNPNVKRRKDAPYKLDELIAFKIPYYVGPLVTPEEQAQNKENVFAWMKRKAAGPITPWNFDEKVDRMESANRFIRRMTTKDTYLFGEDVLPAESMIYQKFVVLNELNNLKINGRHLSLKDKQDVYNDLFKQQKTVSIKALQNYYVTKKKAATAPTVGGLADPKKFLSSLSTYIDFKNMFGERVNDPQFQEDLEQIVEWSTIFEDRGIFKAKLQALGWLSEKQIQQLVAKRYKGWGRLSKKLLTGLKNAEGYSILDEMWRSTENFMQIQSRPEFAALIQQANEKQFEGNDPDNVWENIENILGDAYTSPQNKKAIRQVVKVVQDIEKAVGNPPEKIAIEFTREAAANPQRTQSRLRTLEKLYESAEEVVDAGLTAELAEFKENKHVLSDKYYLYFTQLGRDVYTGDTISLDKLNDYDVDHILPQSFIKDDSLDNRVLTIRAVNNGKSDNVPAKMFGKKMGSFWRHLLDNGMISKRKYNNLITDPDNISKYAQKGFINRQLVETSQVIKLTANILNGIYDKDTEIIEVPAKMNSQMRKMFDLVKVREVNDYHHAFDAYLTIFIGNYLYKCYPKLRPYFVYDNFKKFGNKEDIGHKRFNFLGKIEREKKVVAPETGEILWSNVAPNETIKQIKKVYNYKFMIVSREITTRRAELFNQTVYPKNYRGKLIPIKEDRPTDLYGGYSGNTDAYLAIVALEDKKKGKYFKVVGIPTRAAAKLEKLKQQDSQQYLQALHEVIAPQFTKSTKKGIKKTEFEIVLDKVHYRQLVQDGPVKMMLGSSTYKYNAKQLVLSEKAL

SEQ ID NO: 141 - protein, 1398 aa, Veillonella parvula
METQASNQLISSHLKGYPIKDYFVGLDIGTSSVGWAVTNKAYELLKFRSHKMWGSRLFDEGESAVARRGFRSMRRRLERRKLRLKLLEELFADAMAQVDPTFFMRLRESKYHYEDKTTGHSSKHILFIDKNYNDQDYFKEYPTVYHLRSELMKSGTDDIRKLFLAVHHILKYRGNFLYEGATFDSNASTLDDVIKQALENITFNCFDCNSAISSIGQILMEAGKTKSDKAKAIEHLVDTYIATDTVDTSSKTQKDQVKEDKKRLKAFANLVLGLNASLIDLFGSVEELEEDLKKLQITGDTYDDKRDELAKAWSDEIYIIDDCKSVYDAIILLSIKEPGLTISESKVKAFNKHKDDLAILKSLLKSDRSIYNTMFKVDEKGLHNYVHYIKQGRTEETSCNREDFYKYTKKIVEGLSDSKDKEYILSQIELQILLPLQRIKDNGVIPYQLHLEELKAILAKCGPKFPFLNEVADGFSVAEKLIKMLEFRIPYYVGPLNTHHNVDNGGFAWAVRKASGRVTPWNFDDKIDREKSAAAFIKNLTNKCTYLLGEDVLPKSSLLYSEFMLLNELNNVRIDGKPLEKVVKEHLIEAVFKQDHKKMTKNRIEQFLKDNGYISETHKHEITGLDGEIKNDLASYRDMVRILGDGFDRSMAEEIITDITIFGESKKMLRETLRKKFASCLDDEAIKKLTKLRYRDWGRLSQKLLNGIEGCDKAGDGTPETIIILMRNFSYNLMELLGDKFSFMERIQEINAKLTEGQIVNPHDIIDDLALSPAVKRAVWQALRIVDEVAHIKKALPARIFVEVTRSNKNEKKKKDSRQKRLSDLYAAIKKDDVLLNGLNNEIFGELKSSLAKYDDAALRSKKLYLYYTQMGRCAYTGEIIELSLLNTDNYDIDHIYPRSLTKDDSFDNLVLCKRTANAQKSDAYPISEEIQKTQKPFWTFLKQQGLISERKYERLTRITPLTADDLSGFIARQLVETNQSVKAATTLLRRLYPGVDVVFVKAENVTDFRHDNNFIKVRSLNHHHHAKDAYLNIVVGNVYHERFTRNFRAFFKKNGANRTYNLAKMFNYDVNCTNAKDGKAWDVKTSMDTVKKMMDSNDVRVTKRLLEQTGALADATIYKATVAGKAKDGAYIGMKTKSSVFADVSKYGGMTKIKNAYSIIVQYTGKKGEVIKEIVPLPIYLTNRNTTDQDLINYVASIIPQAKDISIIYGKLCINQLVKVNGFYYYLGGKTNSKFCIDNAIQVIVSNEWIPYLKVLEKFNNMRKDNKDLKANVVSTRALDNKHTIEVRIVEEKNIEFFDYLVSKLKMPIYQKMKGNKAAELSEKGYGLFKKMSLEEQSIHLIELLNLLTNQKTTFEVKPLGITASRSTVGSKISNQDEFKVINESITGLYSNEVTIV

SEQ ID NO: 142 - protein, 1485 aa, Prevotella bivia
MKNILGLDLGTNSIGWAKISIDDNGKYIKDSIKLGSRIIPMSQDVLSNFSKGVTLSQTSERTSFRGARRLRERTLLRRERLHRILHLLGFLPKHYEKAIGWDRNDNKTYGKFINHAEPKLAWCKDNNGKMRFLFMDSFHDMLSEFSEKHPELLANGKKIPLDWTIYYLRKKALYKAITKEELAWILLNFNQKRGYYQLRGEEDRDSEANKKEYLELKVIGVEATGEKKGNDIWYNIHLENGWIYRRSSKNPLNDWLGKVKSFIVTTDLDADGNPKKDKDGNIKRSFRAPSEGDWTLIKKRTESLLENSGQTVGQFIYNHILEEPSAKIRGNFIRTIERKYYKDELKAILEKQKEFHHELSSESLLTECAKELYKRNIAHQEVLLKKGIIHLLLNDILFYQRPLKIKKSLIDNCPYENYKYVDKKSGDIKVKSIKCIAKSNPFFQEFRLWQFVSNLRLYRKSDDKDVTSEHLVTTDDYANLFTYLNNRKDIKQSVLLKEYFKIKKVKTINGAEYPVRWNYIDDDNKTYPCNETRYDILHALSKTELKSEWLTPERTYRLWHLLYSIESKEETKKALNKLNLSDDFTEAFLTIKPFKKEYGSYSEKAIKKLLSLMRMGYLWSEDEAIKQVGAEIEKTIEGELPDYVLQRLEKSQHNYNKISDFSGLPLWLASYIIYGRHSEAKEIIHWDNPESMMAYIKDFRQHSMRNPIVEQCVLETLRTVHDIWKEIGHIDEIHIELGREMKSTSEQRKAITQNVLHNQNTNIRIKLLLQELKNDNNITGVRPYSPMQQEILRIYEEGALQGLTKEDKDYNDILKISQTAQPTSNELTRYKLWLEQKYRSPYTGKAISLSKLFTSAYQIEHVIPQSRYFDDSLSNKVICESEVNTLKKAMLGMEFIKTCGGQKVHCTLLGDVEIYNEEDYKAFVNEHYSNNRTKRNKLLMEDIPQEFINRQLNDSRYISKMVKQLLSAIVRGQEEVEATSKFVIPCTGGITDRLKKDWGLNDIWNNLVSPRFQRMNALTGSEYFGHWENKEGKRVFQTTMPIQLQQGFSKKRIDHRHHAMDALVIACASRNIISYLNNETAQDTERRRDLRQKLCDKGGSVRKPWDSFTQDTQYALKDIIVTFKNYVRIINKATNYYEHYKTDGKKGMISQKGDELWAIRKPMHKETVFGKVNLRRPKRVSLSKAIDSVDIICNRKLKKYIKARLNEGLQKKQILNIFKELNNVWEGIDVNKIDIWEMSNDKEPMVATRKQLDTSFDEKKIRSISDTGIQKILLNYLITKNNNPELAFTPEGIQEMNSNISEYNDHKKHQPIYKVRVTEPLGAKYPIGTMGNNPKKFVEAQAGTNLYFAIYEDKEGKRNYDTIPLNIAAERLNQQLSPVPETNENNTPLKFYLSPNDLVYVPSEEERHSGNNIQLDKNRIYKMVSSTSKRCFFIHHRVAISLVDKKEFSAQNKMERSIDNEQVMIKSVCWKLITDRLGNIIKVIK

SEQ ID NO: 143 - protein, 1218 aa, Prevotella buccalis
MNKRILGLDTGTNSLGWAVVDWDEHAQSYELIKYGDVIFQEGVKIEKGIESSKAAERSGYKAIRKQYFRRRLRKIQVLKVLVKYHLCPYLSDDDLRQWHLQKQYPKSDELMLWQRTSDEEGKNPYYDRHRCLHEKLDLTVEADRYTLGRALYHLTQRRGFLSNRLDTSADNKEDGVVKSGISQLSTEMEEAGCEYLGDYFYKLYHEQGNKVRIRQRYTDRKKHYQHEFDAICEKQELSSELIEDLQRAIFFQLPLKSQRHGVGRCTFERGKPRCADSHPDYEEFRMLCFVNNIQVKGPHDLELRPLTYEEREKIEHLFFRKSKPNFDFEDIAKELAGKKNYAWIHDKEERAYKFNYRMTQGVPGCPTTAQLKSIFGDDWKTGIAETYTLIQKKNGSKSLQEMVDDVWNVLYSFSSVEKLKEFAHHKLQLDEENAEKFAKIKLSHSFAALSLKAIRKFLPFLRKGMYYTHASFFANIPTIVGKEIWNNEQSRKYIMENVGELVFNYQPKHRDVQGTIEMLIKDFLANNFELPAGATDKLYHPSMIETYPHALRNEFGILQLGSPRTNAIRNPMAMRSLHVLRRVVNQLLKESIIDENTEVHVEYARELNDANKRRAIADRQKEQDKQHKKYGDEIRKLYKEETGKDIEPTQTDVLKFQLWEEQNHYCLYTGEQIGITDFIGSNPKFDIEHTIPQSVGGDSTQMNLTLCDNRFNREVKKAKLPTELANHEEILTRIEPWKNKYEQLVKERDKQRTFAGMDKAVKDIRIQKRHKLQMEIDYWRGKYERFTMTEVPEGFSRRQGTGIGLISRYAGLYLKSLFHQADSRNKSNVYVVKGVATAEFRKMWGLQSEYEKKCRDNHSHHCMDAITIACIGKREYDLMAEYYHMEETFRQGRGSKPKFSKPWATFTEDVLNIYKNLLVVHDTPNNMPKHTKKYVQTSKGKVLAQGDTARGSLHLDTYYGAIERDGEIRYVVRRPLSSFTNPKELENIVDETVKRTIKEAIADKNFKQAIAEPIYMNEDKGILIKKVRCFANSVKQPINIRQHRDLSKKEYKQQYHVMNENNYLLAIYEGLVKNKVVREFEIVSYIEAAKYYKRSQDRNIFSSIVPTHSTKYGLPLKTKLLMGQQVLMFEENPDEIQVDNTKDLVKRLYKVVGIEKDGRIKFKHHQEARKEGLTIYSTPYKNNDDYVPIFRQSIKNINILVDGIDFNIDILGKVTLKE

SEQ ID NO: 144 - protein, 1218 aa, Prevotella timonensis
MNKRILGLDTGTNSLGWAVVDWDEHAQSYELIKYGDVIFQEGVKIEKGIESSKAAERSGYKAIRKQYFRRRLRKIQVLKVLVKYHLCPYLSDDDLRQWHLQKQYPKSDELMLWQRTSDEEGKNPYYDRHRCLHEKLDLTVEADRYTLGRALYHLTQRRGFLSNRLDTSADNKEDGVVKSGISQLSTEMEEAGCEYLGDYFYKLYDAQGNKVRIRQRYTDRNKHYQHEFDAICEKQELSSELIEDLQRAIFFQLPLKSQRHGVGRCTFERGKPRCADSHPDYEEFRMLCFVNNIQVKGPHDLELRPLTYEEREKIEPLFFRKSKPNFDFEDIAKALAGKKNYAWIHDKEERAYKFNYRMTQGVPGCPTIAQLKSIFGDDWKTGIAETYTLIQKKNGSKSLQEMVDDVWNVLYSFSSVEKLKEFAHHKLQLDEESAEKFAKIKLSHSFAALSLKAIRKFLPFLRKGMYYTHASFFANIPTIVGKEIWNKEQNRKYIMENVGELVFNYQPKHREVQGTIEMLIKDFLANNFELPAGATDKLYHPSMIETYPNAQRNEFGILQLGSPRTNAIRNPMAMRSLHILRRVVNQLLKESIIDENTEVHVEYARELNDANKRRAIADRQKEQDKQHKKYGDEIRKLYKEETGKDIEPTQTDVLKFQLWEEQNHHCLYTGEQIGITDFIGSNPKFDIEHTIPQSVGGDSTQMNLTLCDNRFNREVKKAKLPTELANHEEILTRIEPWKNKYEQLVKERDKQRTFAGMDKAVKDIRIQKRHKLQMEIDYWRGKYERFTMTEVPEGFSRRQGTGIGLISRYAGLYLKSLFHQADSRNKSNVYVVKGVATAEFRKMWGLQSEYEKKCRDNHSHHCMDAITIACIGKREYDLMAEYYRMEETFKQGRGSKPKFSKPWATFTEDVLNIYKNLLVVHDTPNNMPKHTKKYVQTSIGKVLAQGDTARGSLHLDTYYGAIERDGEIRYVVRRPLSSFTKPEELENIVDETVKRTIKEAIADKNFKQAIAEPIYMNEEKGILIKKVRCFAKSVKQPINIRQHRDLSKKEYKQQYHVMNENNYLLAIYEGLVKNKVVREFEIVSYIEAAKYYKRSQDRNIFSSIVPTHSTKYGLPLKTKLLMGQLVLMFEENPDEIQVDNTKDLVKRLYKVVGIEKDGRIKFKYHQEARKEGLPIFSTPYKNNDDYAPIFRQSINNINILVDGIDFTIDILGKVTLKE

SEQ ID NO: 145 - protein, 1487 aa, Prevotella timonensis
MKNILGLDLGSNSVGWALVKVEENGNPIGSIKMGSRIIPMSQDILGSFEKGDTVSQTAQRTLYRGKRRLIERHVLRRERLCRVLHIMNFLPAHFDRLLGWDKTDNKTYGKFIDDSEPKLAWRQNKNEMGKMEFVFMDSFHEMLSDFAKHQPQLIANGKKVPLDWTIYYLRKKALTQLISKEELAWILLNFNKKRGYYQLRGEEEEEQPTKKEEYKVLKVISVDADEGQKGNGIWYNIHLEDGGIYKKKSDIPLYDWVGKTLQLIVVTTYEKDGKTPKIFDSGKQNPSYRLPKEDDWGLVKKRTESQLQSSGKTVGAFIYDNILSKPDDKIRGNLVRTIERKYYKKELIEILQQQAKYHDELHNQNLLESCAKELYAHNDVHYNEVIKSNMINLLVNDIIFYQRPLKSKKSLIANCKYESYEYVDKETGEIKEMPIKCIAKSNPYYQEFRLWQFIHNLRLSDVVTREDVTAQYLSTPQDYCNLFTYLNDRKEIKQDILLKDFFKIKKVQIDKEKVFPIEWNYIKDATKSYPCNETRYELLSALKRAGMDKQWLDDTPNMQYRLWHLLYSVEEKEESAKALRKLYDDDKFVTSFLKIKPFNKCYGAYSEKAIKRLLTLMRMGKAWNEQAIDAKTLKCIQQIITDNVDSKLKEKIDDSRYVLHHVSDFQGLPTYLASYVIYGRHSEVTDIQCWDSPEDLLKFIRDFKQHSLRNPIVEQVILETLRVVYDIWKAEKHIDEIHVEVAREMKLTAQQRNEANLRNLNNEATNLRIKYLLEELKNDTFIKDVRPLSPIHQEKMRIYEQAVLGNLNKQDKDYDDIIKISKKEHPTNAELIRYKLWLEQRYCSPYTGKAISLSKLFTTAYEIEHIIPQSRYFDNSFNNKVICEAEVNKAKGNMLGYEFIKKQGGQKIYCTQLGKAVTILKEEAYKQFVNEHYAHNKRKRDNLLAENIPESFSSRQLNDTRYITKTIMSLLSNVVRQQSEEEATAKNLLPSSGSVTDRLKNDWGLKDVWNTIVTPRFERLNKLSGTNDFGEMKEENGNRYFQTNVPLEYEKGFKKKRIDHRHHAMDALVIACTTRNMVNYISNANANSPKQREDLRQLLCDKNRIINKPWDTFTQDALKALNDIVVSFKNNVRIINRATNRYQRYDKNGKKIIFSQKGDDMWAIRKSMHKETVFGRVNLIRKEVLPIAKALDNISAICNAQLRAYVNDLVDKHFNKKQLVAHFKSLNYKWNRQDVSKVEVWISSDNKTPMVAVRKPLDTSFDKKKIASITDTGIQTILLNYLESKGGDASVAFAPEGIQEMNSNIELYNNGKAHKPIKNVRLSEPLGAKYQVGERGAKTKKYVEADKGTNLFFAIYEDEEGKRYYYSVPLREAIERQKQKLSPVPEYNEKGVALKFYLSPNDLVYVPTEEERTMGTCHIDKARIYKMVSSTGCSCYFVPSTFAKVIVDKVELQSLNKMEKAITDECIKEVCWKLKVDRLGNIINVIK

SEQ ID NO: 146 - protein, 1138 aa, Bifidobacterium dentium
MLCRCHRRYRIGIDVGLMSVGLAAIEVDETGFPIRILNIQSVIHDGGIDPQLGKKKSISRKAISGVARRTRRMRRRKVVRLRQLDATLESLGFPIVEPDSLDTWEIWLTRAKLASSYIQDDETRKEDVSIALRHIARHRGWRNPYSNVESLFVDVAPSEQYEELRRKAEEKLGTSLSGNPTSAEIVECILKRQVGEVQLRTRSRKGVNGNAVEKEGLLPTKLMQSDNAAEIRRIFKVQRIDDETGRKLLRAVFKACSPKGSVERRVGRDALAPGLPRALKASLAFQEYRIANVLTNLVISEDGTKRKLTIAEKQRVFGFLSSNETDDITWIDVAEKLGLERRQIQGVGCLTADGEERISSTPPRNITALHIHSAKPVIREKLVAWWKAASPTVRETMVELLSNTVDIDRVREDMDYSSAVAFIDSLGDEELTALDSVDLLSGRAAYSRQTLKQLTERMLNTDDDLHEARKAVFGVDDNWKPPVDAISTSVGNPAVDRVLKIVNRYLLACQKRWRNPQSVQIEHVRESFSSVAKAKETERVQGERARYRNDLRRELCEQEGLNKIRESDIRRWESVQRQNGTCLYCGSPITFRTCEMDHIVPRKGVGSTNTRVNLAAACAACNKLKSNTAFSVWARTEGAANRKVSQRDAIERVKTFIFNKSVPPREQRAFKQAVISRLRQAESDPAIDNRSIESVAWMADELHRRIEAYFNQDADVSGNTPATQVWVFQGRVTALARKASGIEGRIHFAGEWKKTRLDRRHHAVDAAVIAMMNHSAAQTLVERDSLRLSQWITRKPETWKNYPFSEGQKKTRFKEWLDCMNALLDLLNDALDSDRVPVTRCQRMSLGNSQAHAATIRKMKRVELFSPMDADLIRRASTPALYCALTRLPEYSPEKGLPENRGREIVLNGRHIRSTETVDFFASGAAQLMVRNGSAEIGDSIHHMRIYRYRKTGAKSQEYVYGMIRVFQIDLLHASSENLFAVQLPSQSVSVRYGDKNVVQAIQEGRAEYLGHIVPNDEILISYEGVRMKDSEKIGAYANDFSGTASELAQRRHWVVVGSDVSKLALRPSYLSEEGLENSGSESERLSKQTRKVIEGKGWVVAVNILAKYHPVVIRRNALGEPRFRTNSGMPVSWRWDR

SEQ ID NO: 147 - protein, 587 aa, Neisseria subflava
MATSRSRIRSQTDAFGVVGSLVAFNQTSRLFVAKKNEGETADKELGALLKGVADNAHALQTGNFRTPAELALNKFEKESGHIRNQRGDYSHTFNRKDLQAELNLLFEKQKEFGNPHVSDGLKEGIETLLMAQRPALSGDAVQKMLGYCTFEPTEPKAAKNTYTAGRFIWLTKLNNLRILEQGSERPLTTTERATLMDEPYRKSKLTYAQARKLLGLEDTAFFKGLRYGKDNAEASTLMEMKAYHAISRALEKEGLKDKKSPLNLSPELQDEIGTAFSLFKTDEDITGRLKDRVQPEILEALLKHISFDKFVQISLKALRRIVPLMEQGKRYDEACAEIYGDHYGKKNAEEKIYLPPIPADEIRNPVVLRALSQARKVINAVVRRYGSPARIHIETAREVGKSFKDRKEIEKRQEENRKDREKAAAKFREYFPNFVGEPKSKDILKLRLYEQQHGKCLYSGKEINLGRLNEKGYIEIDHALPFSRTWDDSFNNKVLVLGSENQNKGNQTPYEYFNGKDNSREWQEFKARVETSRFPRSKKQRILLQKFDEDGIYRIGVKTALSFPKYQIDELGKEIRPCRLKKRPPVR

SEQ ID NO: 148 - protein, 1269 aa, Mycoplasma gallisepticum
MNNSIKSKPEVTIGLDLGVGSVGWAIVDNETNIIHHLGSRLFSQAKTAEDRRSFRGVRRLIRRRKYKLKRFVNLIWKYNSYFGFKNKEDILNNYQEQQKLHNTVLNLKSEALNAKIDPKALSWILHDYLKNRGHFYEDNRDFNVYPTKELAKYFDKYGYYKGIIDSKEDNDNKLEEELTKYKFSNKHWLEEVKKVLSNQTGLPEKFKEEYESLFSYVRNYSEGPGSINSVSPYGIYHLDEKEGKVVQKYNNIWDKTIGKCNIFPDEYRAPKNSPIAMIFNEINELSTIRSYSIYLTGWFINQEFKKAYLNKLLDLLIKTNGEKPIDARQFKKLREETIAESIGKETLKDVENEEKLEKEDHKWKLKGLKLNTNGKIQYNDLSSLAKFVHKLKQHLKLDFLLEDQYATLDKINFLQSLFVYLGKHLRYSNRVDSANLKEFSDSNKLFERILQKQKDGLFKLFEQTDKDDEKILAQTHSLSTKAMLLAITRMTNLDNDEDNQKNNDKGWNFEAIKNFDQKFIDITKKNNNLSLKQNKRYLDDRFINDAILSPGVKRILREATKVFNAILKQFSEEYDVTKVVIELARELSEEKELENTKNYKKLIKKNGDKISEGLKALGISEDEIKDILKSPTKSYKFLLWLQQDHIDPYSLKEIAFDDIFTKTEKFEIDHIIPYSISFDDSSSNKLLVLAESNQAKSNQTPYEFISSGNAGIKWEDYEAYCRKFKDGDSSLLDSTQRSKKFAKMMKTDTSSKYDIGFLARNLNDTRYATIVFRDALEDYANNHLVEDKPMFKVVCINGSVTSFLRKNFDDSSYAKKDRDKNIHHAVDASIISIFSNETKTLFNQLTQFADYKLFKNTDGSWKKIDPKTGVVTEVTDENWKQIRVRNQVSEIAKVIEKYIQDSNIERKARYSRKIENKTNISLFNDTVYSAKKVGYEDQIKRKNLKTLDIHESAKENKNSKVKRQFVYRKLVNVSLLNNDKLADLFAEKEDILMYRANPWVINLAEQIFNEYTENKKIKSQNVFEKYMLDLTKEFPEKFSEFLVKSMLRNKTAIIYDDKKNIVHRIKRLKMLSSELKENKLSNVIIRSKNQSGTKLSYQDTINSLALMIMRSIDPTAKKQYIRVPLNTLNLHLGDHDFDLHNMDAYLKKPKFVKYLKANEIGDEYKPWRVLTSGTLLIHKKDKKLMYISSFQNLNDVIEIKNLIETEYKENDDSDSKKKKKANRFLMTLSTILNDYILLDAKDNFDILGLSKNRIDEILNSKLGLDKIVK

SEQ ID NO: 149 - protein, 1354 aa, Prevotella melaninogenica
MADFAKYQPGMVADGRKIPLDWTLYYLRKKALTQAIRKEELAWILLNFNQKRGYYQLRGEEEEENSTKHEEYYELKVVSVEAAEEGKGGNTWYNVTLENGWIYRRQSKIELNDWVGKVRPFIVTTEYEIDGVTIKKDKNGEVKRSFRAPSENDWGLRKKRTESLLEESGKTVGAFIYNHILSEPADKIRGNFIRTIERKFYKKELEAILREQSKHQKELKDIDTLIACIKELYPNNKPHQDSLIKKDMTYLLITDLIFYQRPLKSKKSLIADCPYEYYEYVIKETGENKRQSIKCIAKSNPYYQEFRLWQFIINLRLFDRNNDKEVTSEYLSSMEDYTRLFTYLNDRKDINQETLLKDFFKQKKVKRGMEKEFPIRWNYIEDKEKKYPCNETRHELLTALGKVGIDHSWLDDKELFYRLWHLLYSVESKEEAEGALRKLVDNDDFVNAFLKIKPFKKEYGAYSEKAIKKLLAVMRMGNLWNEVDICEQTRDRIQNIIKGDIDEKIKDRMGRTFSQLSDFQGLPEWLACYVVYGQHSEATDIQRWTKPENLMAYINGFKQHSLRNPIVEQCILETLRTVHDIWKEAGHIDEIHIELGRGMKSTADQRARMSKSIMQNENTNLRIKSLLMELKNAKEFENVRPYSPMQQEILRIYEEGALQELTKEDAQYNEISKISQMAQPSANELLKYRLWLEQKYCSPYTGKPISLSKLFTSAYQIEHIIPQSRYFDDSFTNKVICEAEVNQLKSNMLGYEFIKKHGGEIVRCTMIGDVKLLDAKEYYNFVTEHYTNNRRKKEKLLMEDIPQEFLNRQMNDSRYISKKVMAILSNIVREEDEQEAKSKFVIACSGGITDRLKQDWGLNDVWNSIVYPRFERLNKLTNTENFGRWENKKGKQVFQTSVPLELQKDFSKKRIDHRHHAMDALVIACASNNIINYLNNESAKSQEKREDLRKKLCDKNRIIRKPWETFTQDAHTALENVVVSFKNYIRVINKATNYYEKYDKNGKKEIAEQKGQDMWAIRKPMHKETVFGQVNLRRKITIKLKDALEKIPAICDKELRDYINILVAKQFNKKQILAHFKSINYRLNMKSVDKVDVWQFSNEKEPMVATRKSVDTSFDTKRIATITDTGIQKILLNYLKAKNNDPNIAFTPEGIAEMNKHITEYNNGKQHQPILKVRVSEPKGAKYQVGETGNKRSKFVEAQKGTNLYFAIYEDKEGNRSYNTIPLNEVIERLKQGLSPVPDANEKSIPLKFHLSPNDLVYVPKTDEENEIKMGQIYKFVDSSGTTANFVPHRVSNLIYNVDKKIAENFCNHEIIQNEYGIGSPQSKNQKSITGEMIKAVCWKLEVDRLGNIHKIIK

SEQ ID NO: 150 - protein, 1130 aa, Streptococcus gallolyticus
MTNGKILGLDIGIASVGVGIIEAKTGKVVHANSRLFSAANAENNAERRGFRGSRRLNRRKKHRVKRVRDLFEKYEIVTDFRNLNLNPYELRVKGLTEQLTNEELFAALRTISKRRGISYLDDAEDDSTGSTDYAKSIDENRRLLKTKTPGQIQLERLEKYGQLRGNFTVYDENGEAHRLINVFSTSDYEKEARKILETQADYNKKITAEFIDDYVEILTQKRKYYHGPGNEKSRTDYGRFRTDGTTLENIFGILIGKCSFYPDEYRASKASYTAQEYNFLNDLNNLKVPTETGKLSTEQKEALVEFAKSTATLGPAKLLKEIAKILDCKVDEIKGYREDDKGKPDLHTFEPYRKLKFNLDSVNIDDLSREVLDKLADILTLNTEREGIEDAIRHNLPNQFTEGQISEIIKVRKSQSTAFNKGWHSFSAKLMNELIPELYATSDEQMTILTRLEKFKVNKKSSKNTKTIDEKEVTDEIYNPVVAKSVRQTIKIINAAVKKYGDFDKIVIEMPRDKNADDEKKFIDKRNKENKKEKDDALKRAAYLYNGTDKLPDEVFHGNKQLETKIRLWYQQGERCLYSGKPIPIQELVHNSNNFEIDHILPLSLSFDDSLANKVLVYAWTNQEKGQKTPYQVIDSMDAAWSFREMKDYVLKQKGLGKKKRDYLLTTENIDKIEVKKKFIERNLVDTRYASRVVLNSLQSALRELGKDTKISVIRGQFTSQLRRKWKIDKSRETYHHHAVDALIIAASSQLKLWEKQDNPMFVDYGNNQVVDKQTGEILSVSDDEYKELVFQPPYQGFVNMISSKGFEDEILFSYQVDSKYNRKVSDATIYSTRKAKIGKDKKEETYVLGKIKDIYSQNGFDTFIKKYNKDKTQFLMYQKDPLTWENVIEVILRDYPTTKKSEDGKNDVKCNPFEEYRRENGLVCKYSKKGKGTPIKSLKYYDKKLGNCIDITPEGSKNEVVLQSLNPWRADVYFNPETLKYELLGLKYSDLSFEKGTGKYHISQEKYDVIKEKEGIGKKSEFKFTLYRNDLILIKDTASGEQEIYRFLSRTMPNVKHYAELKPYDKEKFDNVQELVEALGEADKVGRCIKGLNKSNLSIYKVRTDVLGNKYFVKKEGDKPKLDFKNNKK

SEQ ID NO: 151 - protein, 1371 aa, Streptococcus gallolyticus
MTEKNYSIGLDIGTNSVGWAVITDDYKVPAKKMKVLGNTDKKYIKKNLLGALLFDNGETAEATRLKRTARRRYTRRKNRLRYLQEIFAEEMAKVDESFFYRLDESFLTTDDKDFERHPIFGNKADEIKYHQEFPTIYHLRKHLADSHEKADLRLIYLALAHMIKFRGHFLIEGELNAENTDVQKLFEAFVEVYDRTFDDSNLSEITVDASSILTEKFSKSRRLENLIKHYPTEKKNTLFGNLVALALGLQPNFKTSFKLSEDAKLQFSKDTYEEDLEELIGKIGDEYADLFTSAKNLYDAILLSGILTVADNTTKAPLSASMIKRYNEHQVDLKKLKEFIKNNASDKYDEIFNDKDKNGYAGYIENGVKQDEFYKYLKTTLSKIDGSDYFLDKIEREDFLRKQRTFDNGSIPHQIHLQEMHAILRRQGEHYAFLKENQAKIEKILTFRIPYYVGPLARKNSRFAWAEYHSDEKITPWNFDEIIDKEKSAEKFITRMTLNDLYLPEEKVLPKHSLVYETYTVYNELTKVKYVNEQGKSNFFDANMKQEIFEHVFKENRKVTKDKFLNYLNKEFPEYRIQDLIGLDKENKSFNASLGTYHDLKKILDKSFLDDKTNETIIEDIIQTLTLFEDRDMIRQRLQKYSDIFTPQQLKKLERRHYTGWGRLSYKLINGIRNKENGKSILDYLIDDGYANRNFMQLISDDTLPFKQIIKDAQIIGDIDDVTSVVRELPGSPAIKKGILQSVKIVDELVKVMGHNPDNIVIEMARENQTTNRGRNQSQQRLKKLQDSLKELGSNILNEEKPSYIEGKVENNHLQDDRLFLYYIQNGKDMYTGDELDIDHLSDYDIDHIIPQAFIKDDSIDNRVLTSSAKNRGKSDDVPSLDIVHDRKADWIRLYKSGLISKRKFDNLTKAERGGLTENDKAGFIKRQLVETRQITKHVAQILDSRFNTERDENDKVIRNVKVITLKSNLVSQFRKDFKFYKVREINDYHHAHDAYLNAVVGTALLKKYPKLAPEFVYGEYKKYDIRKFITSSGDKATAKYFFYSNLMNFFKRVIRYSNGKVVVRPVIECSKDTGEIAWNKQTDFEKVRRVLSYPQVNIVKKVETQTGGFSKESILPKGNSDKLIPRKTKKFRWDTPKYGGFDSPNIAYSVFVIADVEKGKAKKLKTVKELVGISIMERSSFEENPVVFLEKKGYQNVQEDNLIKLPKYSLFEFEGGRRRLLASASELQKGNEVVLSRHLVELLYHAHRVNSFNNSEHLKYVSEHKKEFGEVLSCVENFAKSYVDVEKNLGKIRAVADKIDTFSIEDISISFVNLLTLTALGAPADFNFLGEKIPRKRYTSTKECLNATLIHQSITGLYETRIDLSKLGEE

SEQ ID NO: 152 - protein, 1168 aa, Azospirillum sp.
MARPAFRAPRREHVNGWTPDPHRISKPFFILVSWHLLSRVVIDSSSGCFPGTSRDHTDKFAEWECAVQPYRLSFDLGTNSIGWGLLNLDRQGKPREIRALGSRIFSDGRDPQDKASLAVARRLARQMRRRRDRYLTRRTRLMGALVRFGLMPADPAARKRLEVAVDPYLARERATRERLEPFEIGRALFHLNQRRGYKPVRTATKPDEEAGKVKEAVERLEAAIAAAGAPTLGAWFAWRKTRGETLRARLAGKGKEAAYPFYPARRMLEAEFDTLWAEQARHHPDLLTAEAREILRHRIFHQRPLKPPPVGRCTLYPDDGRAPRALPSAQRLRLFQELASLRVIHLDLSERPLTPAERDRIVAFVQGRPPKAGRKPGKVQKSVPFEKLRGLLELPPGTGFSLESDKRPELLGDETGARIAPAFGPGWTALPLEEQDALVELLLTEAEPERAIAALTARWALDEATAAKLAGATLPDFHGRYGRRAVAELLPVLERETRGDPDGRVRPIRLDEAVKLLRGGKDHSDFSREGALLDALPYYGAVLERHVAFGTGNPADPEEKRVGRVANPTVHIALNQLRHLVNAILARHGRPEEIVIELARDLKRSAEDRRREDKRQADNQKRNEERKRLILSLGERPTPRNLLKLRLWEEQGPVENRRCPYSGETISMRMLLSEQVDIDHILPFSVSLDDSAANKVVCLREANRIKRNRSPWEAFGHDSERWAGILARAEALPKNKRWRFAPDALEKLEGEGGLRARHLNDTRHLSRLAVEYLRCVCPKVRVSPGRLTALLRRRWGIDAILAEADGPPPEVPAETLDPSPAEKNRADHRHHALDAVVIGCIDRSMVQRVQLAAASAEREAAAREDNIRRVLEGFKEEPWDGFRAELERRARTIVVSHRPEHGIGGALHKETAYGPVDPPEEGFNLVVRKPIDGLSKDEINSVRDPRLRRALIDRLAIRRRDANDPATALAKAAEDLAAQPASRGIRRVRVLKKESNPIRVEHGGNPSGPRSGGPFHKLLLAGEVHHVDVALRADGRRWVGHWVTLFEAHGGRGADGAAAPPRLGDGERFLMRLHKGDCLKLEHKGRVRVMQVVKLEPSSNSVVVVEPHQVKTDRSKHVKISCDQLRARGARRVTVDPLGRVRVHAPGARVGIGGDAGRTAMEPAEDIS

SEQ ID NO: 153 - protein, 1345 aa, Streptococcus mutans
MKKPYSIGLDIGTNSVGWAVVTDDYKVPAKKMKVLGNTDKSHIKKNLLGALLFDSGNTAADRRLKRTARRRYTRRRNRILYLQEIFAEEMSKVDDSFFHRLEDSFLVTEDKRGERHPIFGNLEEEVKYHENFPTIYHLRQYLADNPEKVDLRLVYLALAHIIKFRGHFLIEGKFDTRNNDVQRLFQEFLAVYDNTFENSSLQEQNVQVEEILTDKISKSAKKDRVLKLFPNEKSNGRFAEFLKLIVGNQADFKKHFELEEKAPLQFSKDTYEEELEVLLAQIGDNYAELFLSAKKLYDSILLSGILTVTDVSTKAPLSASMIQRYNEHQMDLAQLKQFIRQKLSDKYNEVFSDVSKDGYAGYIDGKTNQEAFYKYLKGLLNKIEGSGYFLDKIEREDFLRKQRTFDNGSIPHQIHLQEMRAIIRRQAEFYPFLADNQDRIEKILTFRIPYYVGPLARGKSDFAWLSRKSADKITPWNFDEIVDKESSAEAFINRMTNYDLYLPNQKVLPKHSLLYEKFTVYNELTKVKYKTEQGKTAFFDANMKQEIFDGVFKVYRKVTKDKLMDFLEKEFDEFRIVDLTGLDKENKAFNASYGTYHDLRKILDKDFLDNSKNEKILEDIVLTLTLFEDREMIRKRLENYSDLLTKEQVKKLERRHYTGWGRLSAELIHGIRNKESRKTILDYLIDDGNSNRNFMQLINDDALSFKEEIAKAQVIGETDNLNQVVSDIAGSPAIKKGILQSLKIVDELVKIMGHQPENIVVEMARENQFTNQGRRNSQQRLKGLTDSIKEFGSQILKEHPVKHSQLQNDRLFLYYLQNGRDMYTGEELDIDYLSQYDIDHIIPQAFIKDNSIDNRVLTSSKENRGKSDDVPSKNVVRKMKSYWSKLLSAKLITQRKFDNLTKAERGGLTDDDKAGFIKRQLVETRQITKHVARILDERFHTETDENNKKIRQVKIVTLKSNLVSNFRKEFELYKVREINDYHHAHDAYLNAVIGKALLGVYPQLEPEFVYGDYPHFHGHKENKATAKKFFYSNIMNFFKKDDVRTDKNGEIIWKKDEHISNIKKVLSYPQVNIVKKVEEQTGGFSKESILPKGNSDKLIPRKTKKFYWDTKKYGGFDSPIVAYSILVIADIEKGKSKKLKTVKALVGVTIMEKMTFERDPVAFLERKGYRNVQEENIIKLPKYSLFKLENGRKRLLASARELQKGNEIVLPNHLGTLLYHAKNIHKVDEPKHLDYVDKHKDEFKELLDVVSNFSKKYTLAEGNLEKIKELYAQNNGEDLKELASSFINLLTFTAIGAPATFKFFDKNIDRKRYTSTTEILNATLIHQSITGLYETRIDLSKLGGD

SEQ ID NO: 154 - protein, 1024 aa, Helicobacter mustelae
MIRTLGIDIGIASIGWAVIEGEYTDKGLENKEIVASGVRVFTKAENPKNKESLALPRTLARSARRRNARKKGRIQQVKHYLSKALGLDLECFVQGEKLATLFQTSKDFLSPWELRERALYRVLDKEELARVILHIAKRRGYDDITYGVEDNDSGKIKKAIAENSKRIKEEQCKTIGEMMYKLYFQKSLNVRNKKESYNRCVGRSELREELKTIFQIQQELKSPWVNEELIYKLLGNPDAQSKQEREGLIFYQRPLKGFGDKIGKCSHIKKGENSPYRACKHAPSAEEFVALTKSINFLKNLTNRHGLCFSQEDMCVYLGKILQEAQKNEKGLTYSKLKLLLDLPSDFEFLGLDYSGKNPEKAVFLSLPSTFKLNKITQDRKTQDKIANILGANKDWEAILKELESLQLSKEQIQTIKDAKLNFSKHINLSLEALYHLLPLMREGKRYDEGVEILQERGIFSKPQPKNRQLLPPLSELAKEESYFDIPNPVLRRALSEFRKVVNALLEKYGGFHYFHIELTRDVCKAKSARMQLEKINKKNKSENDAASQLLEVLGLPNTYNNRLKCKLWKQQEEYCLYSGEKITIDHLKDQRALQIDHAFPLSRSLDDSQSNKVLCLTSSNQEKSNKTPYEWLGSDEKKWDMYVGRVYSSNFSPSKKRKLTQKNFKERNEEDFLARNLVDTGYIGRVTKEYIKHSLSFLPLPDGKKEHIRIISGSMTSTMRSFWGVQEKNRDHHLHHAQDAIIIACIEPSMIQKYTTYLKDKETHRLKSHQKAQILREGDHKLSLRWPMSNFKDKIQESIQNIIPSHHVSHKVTGELHQETVRTKEFYYQAFGGEEGVKKALKFGKIREINQGIVDNGAMVRVDIFKSKDKGKFYAVPIYTYDFAIGKLPNKAIVQGKKNGIIKDWLEMDENYEFCFSLFKNDCIKIQTKEMQEAVLAIYKSTNSAKATIELEHLSKYALKNEDEEKMFTDTDKEKNKTMTRESCGIQGLKVFQKVKLSVLGEVLEHKPRNRQNIALKTTPKHV

SEQ ID NO: 155 - protein, 765 aa, Butyrivibrio fibrisolvens
MGITIGLDLGVASVGWAVVNDDYEILESCSNIFPSADASKNSERRGFRQGRRLTRRRKNRIHDFQKLWEDKGFVIPSQGTEDVLAIKIKGLSEKLSVDEVYWVLLNSLKHRGISYLDDADSGDNSSDYAKSISRNEEELKEKLPCEIQWERLQKYGAYRGNISIVEDGEPITLRNVFTTSAYKKEVEQFIDTQAKYNAQYSGDFKADYLEIFNRKREYYEGPGNELSRTDYGKYTTEINADGEYITVDNIFDKLVGKCSVNPDERRAAGASYTAQEFNVLNDLNNLTISSESSFIEDGKLTEDAKRKIIETIKNAKTVNVKKIICDVIGDKKCQISGARIDKNEKEIFHSFEAYNKMRRALEEIGFDISSLSRENLDLIGDILTLNTDRESILNAFNRKGIELADEAKDILVKVRKTNGSLFNKWQSFGLSIMNELIPELYAQPKNQMELLTAMGVFKSRGDRFLECKEIPGDLIVDDIYNPVVSKTVRITVRILNALIKKYGYPDRVVIEMPRDKNSDEEQQRLKKEQRDNENEIKDIKARVKTEYGREITEEDFRQHSKLSLKLKLWNEQQGICPYSGKSIKIDDLLDNPNLFEVDHIIPLSISFDDSRNNKVLVYSSENQDKGNRTPLAYLASVNRQWDIHSFMDYVLKTYAGAQKRKKRDNLLNEQDITKVEVLQGFVNRNINDTRYASKVVLNSLQEYFSSKECSTKVKVIRGSFTHQMRVNLKLKKTVMNHMFIMQLMQCLLLFHRWDMTLIMNLQISI

SEQ ID NO: 156 - protein, 1338 aa, Coprococcus catus
MKQEYFLGLDMGTGSLGWAVTDSTYQVMRKHGKALWGTRLFESASTAEERRMFRTARRRLDRRNWRIQVLQEIFSEEISKVDPGFFLRMKESKYYPEDKRDAEGNCPELPYALFVDDNYTDKNYHKDYPTIYHLRKMLMETTEIPDIRLVYLVLHHMMKHRGHFLLSGDISQIKEFKSTFEQLIQNIQDEELEWHISLDDAAIQFVEHVLKDRNLTRSTKKSRLIKQLNAKSACEKAILNLLSGGTVKLSDIFNNKELDESERPKVSFADSGYDDYIGIVEAELAEQYYIIASAKAVYDWSVLVEILGNSVSISEAKIKVYQKHQADLKTLKKIVRQYMTKEDYKRVFVDTEEKLNNYSAYIGMTKKNGKKVDLKSKQCTQADFYDFLKKNVIKVIDHKEITQEIESEIEKENFLPKQVTKDNGVIPYQVHDYELKKILDNLGTRMPFIKENAEKIQQLFEFRIPYYVGPLNRVDDGKDGKFTWSVRKSDARIYPWNFTEVIDVEASAEKFIRRMTNKCTYLVGEDVLPKDSLVYSKFMVLNELNNLRLNGEKISVELKQRIYEELFCKYRKVTRKKLERYLVIEGIAKKGVEITGIDGDFKASLTAYHDFKERLTDVQLSQRAKEAIVLNVVLFGDDKKLLKQRLSKMYPNLTTGQLKGICSLSYQGWGRLSKTFLEEITVPAPGTGEVWNIMTALWQTNDNLMQLLSRNYGFTNEVEEFNTLKKETDLSYKTVDELYVSPAVKRQIWQTLKVVKEIQKVMGNAPKRVFVEMAREKQEGKRSDSRKKQLVELYRACKNEERDWITELNAQSDQQLRSDKLFLYYIQKGRCMYSGETIQLDELWDNTKYDIDHIYPQSKTMDDSLNNRVLVKKNYNAIKSDTYPLSLDIQKKMMSFWKMLQQQGFITKEKYVRLVRSDELSADELAGFIERQIVETRQSTKAVATILKEALPDTEIVYVKAGNVSNFRQTYELLKVREMNDLHHAKDAYLNIVVGNAYFVKFTKNAAWFIRNNPGRSYNLKRMFEFDIERSGEIAWKAGNKGSIVTVKKVMQKNNILVTRKAYEVKGGLFDQQIMKKGKGQVPIKGNDERLADIEKYGGYNKAAGTYFMLVKSLDKKGKEIRTIEFVPLYLKNQIEINHESAIQYLAQERGLNSPEILLSKIKIDTLFKVDGFKMWLSGRTGNQLIFKGANQLILSHQEAAILKGVVKYVNRKNENKDAKLSERDGMTEEKLLQLYDTFLDKLSNTVYSIRLSAQIKTLTEKRAKFIGLSNEDQCIVLNEILHMFQCQSGSANLKLIGGPGSAGILVMNNNITACKQISVINQSPTGIYEKEIDLIKL

SEQ ID NO: 157 - protein, 1035 aa, Candidatus Puniceispirillum
MRRLGLDLGTNSIGWCLLDLGDDGEPVSIFRTGARIFSDGRDPKSLGSLKATRREARLTRRRRDRFIQRQKNLINALVKYGLMPADEIQRQALAYKDPYPIRKKALDEAIDPYEMGRAIFHINQRRGFKSNRKSADNEAGVVKQSIADLEMKLGEAGARTIGEFLADRQATNDTVRARRLSGTNALYEFYPDRYMLEQEFDTLWAKQAAFNPSLYIEAARERLKEIVFFQRKLKPQEVGRCIFLSDEDRISKALPSFQRFRIYQELSNLAWIDHDGVAHRITASLALRDHLFDELEHKKKLTFKAMRAILRKQGVVDYPVGFNLESDNRDHLIGNLTSCIMRDAKKMIGSAWDRLDEEEQDSFILMLQDDQKGDDEVRSILTQQYGLSDDVAEDCLDVRLPDGHGSLSKKAIDRILPVLRDQGLIYYDAVKEAGLGEANLYDPYAALSDKLDYYGKALAGHVMGASGKFEDSDEKRYGTISNPTVHIALNQVRAVVNELIRLHGKPDEVVIEIGRDLPMGADGKRELERFQKEGRAKNERARDELKKLGHIDSRESRQKFQLWEQLAKEPVDRCCPFTGKMMSISDLFSDKVEIEHLLPFSLTLDDSMANKTVCFRQANRDKGNRAPFDAFGNSPAGYDWQEILGRSQNLPYAKRWRFLPDAMKRFEADGGFLERQLNDTRYISRYTTEYISTIIPKNKIWVVTGRLTSLLRGFWGLNSILRGHNTDDGTPAKKSRDDHRHHAIDAIVVGMTSRGLLQKVSKAARRSEDLDLTRLFEGRIDPWDGFRDEVKKHIDAIIVSHRPRKKSQGALHNDTAYGIVEHAENGASTVVHRVPITSLGKQSDIEKVRDPLIKSALLNETAGLSGKSFENAVQKWCADNSIKSLRIVETVSIIPITDKEGVAYKGYKGDGNAYMDIYQDPTSSKWKGEIVSRFDANQKGFIPSWQSQFPTARLIMRLRINDLLKLQDGEIEEIYRVQRLSGSKILMAPHTEANVDARDRDKNDTFKLTSKSPGKLQSASARKVHISPTGLIREG

SEQ ID NO: 158 - protein, 1270 aa, Mycoplasma gallisepticum
MNNSIKSKPEVTIGLDLGVGSVGWAIVDNETNIIHHLGSRLFSQAKTAEDRRSFRGVRRLIRRRKYKLKRFVNLIWKYNSYFGFKNKEDILNNYQEQQKLHNTVLNLKLEALNAKIDPKALSWILHDYLKNRGHFYEDNRDFNVYPTEELANYFDEFGYYKGIIDSKNDDDDKLEEGLTKYKFSNQHWLEEVKKVLSNQTGLPEKFKEEYESLFSYVRNYSEGPGSINSVSPYGIYHLDEKEGKVVQKYNNIWDKTIGKCSIFPDEYRAPKNSPIAMIFNEINELSTIRSYSIYLTGWFINQEFKKAYLNKLLDLLIKTNSEKPIDARQFKKLREETIAESIGKETLKDVESEEKLEKDDHKWKLKGLKLNTNGKIQYNDLSSLAKFVHKLKQHLKLDFLLEDQYTPLDKINFLQSLYVYLGKHLRYSNRVDSANLKEFSDSSRLFERVLQEQKDGLFKLFEQTDKDDEKILTQTHSLSTKAMLLAITRMTNLDNDEDNQKNNDKGWNFEAIKNFDQKFIDITKTNNNLSLKQDKRYLDDQFINDAILSPGVKRILREATKVFNAILKQFSEEYDVTKVVIELARELSEEKELENTKNYKKLIKKNGDKISEGLKALGIAEDKIEEILKSPTKSYKVLLWLQQDHIDPYSQKEIAFDDILTKTEKTEIDHIIPYSISFDDSSSNKLLVLAESNQAKSNQTPYEFINSGKAEITWEVYEAYCHKFKNGDSSLLDSTQRSKKFAKMMKTDTSSKYDIGFLARNLNDTRYATIVFRDALKDYANNHLVEDKPMFKVVCINGGVTSFLRKNFDPKSWYAKKDRDKNIHHAVDASIISIFSNETKTLFNQLTKFADYKLFKNTDGSWKKIDPKTGVVSEVTDENWKQIRVRNQVSEIAKVIDKYIQDSNIERKARYSRKIENKTNISLFNDTVYSAKKVGYEDQIKRKNLKTLDIHESAEENKNSKVKKQFVYRKLVNVSLLNNDKLADLFAEKEDILMYRANPWVINLAEQIFNEYTENKKIKSQNVFEKYMLDLTKEFPEKFSEAFVKSMIRNKTAIIYNVEKDVVHRIKRLKILSSELKENKWSNVIIRSKNESGTKLSYQDTINSIALMIMRSIDPTAKKQYIRVPLNTLNLHLGDQDFDLHNIDAYLKKPKFVKYLKANEIGDEYKPWRVLTSGTLLIHKKDKKLMYISSFQNLNDLIEIKNLIETEYKENVDSDPKKKKKASQILRSLSVILNDYILLDAKYNFDILGLSKNKIDEILNSKLDLDKIAK

SEQ ID NO: 159 - protein, 1204 aa, Prevotella ruminicola
MERILGIDTGTNSLGWAIVDKDENQYHLVAKGTNIFSEGVKIEKGIESSKAAERTEHRSVRKHYWRRKIRKIRLLTILSDNDLCPRLKHEQLRQWRLKKVYPTDDTFMEWQRTEDKAQVNPYKFRYICLTQKLDLSDITQRFILGRALYHLNQRRGFLSNRKEATKESEGTVKEGISSLSKDMKDSGCEYLGEYFYQLYQQGKKIRNHYTARKEHYLKEFKAICSKQELDDALIEKLEKAIFDQRPLKSQKGQVGTCTFEKGKSRCPSSHPLYEDFRMYSFINNIKVQVDTLYDKGERSLTDEEKQLIIPLFKRKSKRTFPFEDIAKKIAGKNNYCYIKSNEEKAYKFNYQMDTQVSGSPVNAQLEEIFGEDWLSSVCEVYTLANNKSRFQIMNDVWHVLFFYDDEDKLKEFAKDRLQLDDELAEKFSKISIPNDYAALSLKAIRKIMPYLRDYGLIYSEAVFLANLVDVLPQHVWGIKEMREAAIENVIDVMHSYDKNNIDGITLEGCVKTFLKERYQVSDDNLKKLYHPSMLDPYPRQRPNDEGVFQLGSPRISSVKNPMAMHSLFRLRKVVNLMLKKGYITPDTKVHIEFSRDLNDANKRWAIQTWQRENEKERERCRKEIEKYIASPSDTDILKYQLWEEQNHKCLYTGDEIRITDFLGDNPKYDIEHTIPRSAGGDSTKMNLTLCSSRFNRDEKKTKLPAELVNHDEILERISNWKEKYEDIDKQIRKISTKGATSKEDKDSKIRRRHYLILQRDYWRGKYQRFTMTEVPEGFSRRQGTDISVISRYARMYLKSVFKQVYIVKGIATSDFRKMWGIQDEYAKKERVNHVHHCIDAITIACIGKAEYDKLADYRHQYDDYLFQGKTKPTFDKPWPSFVIDIKHIQDELLIAHYAKDNLEKFTKKNLRGKDGRIIRDKFGNKLQMKGDTSRNSLHNDKFYGAINHEGEIKYVYRTNIEALDAKSIGNIVDPTVRSIIESAIAIHGSLKAAINKGIWMNEEKHIPIKKVRVFRNDVKKPIELKDQRDLSDKDYKQHYYVTNDGNYMMLIFSKLNNKGREIRQHVVINSLEATEVIKSHKRSQVGKVVWESYYSKEGFDLIYKLKSGTMILLYENNRDEVWDLDIRNLQKRLYIITKMKYDGRIYMMHHQEAREKKDLEEKSGSFKINEDYRPLIVNSYNQFNALVQDLDFEINDLGEIRRLI

SEQ ID NO: 160 - protein, 1178 aa, Scardovia inopinata
MGKRHNSNMAKKKISYRIGIDVGLNSTGLAAIEVDDDGAPIRILNTMSVIHDGGVDPDAAKVRGTRLAISGIARRTRRMRRRRAKRLDRLEQILEKYGYTDTEPVLEEPYGPWICRAELADGFINDDEQRRMMIGIAIRHIARHRGWRNPYQNVRALLNIDDSDLSEEYKNLKEKVQDQINDGKDLPNFTPSQLVRDYLDNFSGQPAARIRTGKAGPRGNRRDAVGILPQRMRQSDYAYELQRIFDMQKIGRDEAQELLMAVFEAKSPKGSAEKRIGKDPLTGKKRALKASLAFQKYRIVATITNLRIKTGTGSERMLSPTELNDIYTYLLRVQDDNHLPTWEDICEEVLHIGRYQLAGIGKTFEGGERISNMPPVIQTSLAIHGLSEGTLAEKLTKWWDKADDDSRESMIKLLSNTVDIDRVNEVDENFASALDFIDSLDDEELTKLDKIALPRGRAAYSEEALNKLTADMLNTGDDLFSARQRIYHVNNSWRPPQPPIGEPLGNPAVDRVLKITNRYLMNCLNRWGQPRRVTIEHTRSGFTSVKQATEHQKISDKRAEYRRDIVKQLEEAGVESVHEYDIRRWEAVQRQNGQCLYCGRDITFKTCEMDHIVPRKGPGSTNTRTNFAAVCPECNRMKSNIPFASWAETKEAKDRGVSLDKAIKQVRFFNFTKNEYSPQAQRNFKKSMIERLKQKTSDEPLDNRSIESVSWMADELYKRIDWYFNHEQYETSKKAINDDKDNLSGTQVVVYPGSITAEARNAAGLGGNIHFIGGRYKTRLDRRHHAVDACVIAMMEPGIARILTERNQLRQAQRLTARIEDDEVNWKDYPTENTAGYNKYQAWSDRMHALLEYMNNALDYDKIPVVRWERLQLGNRSAHEDTIHPLKKLPLSHEISAIDINHASTPALYEALVSLPDFSEQDGLPADPSRQINVNGERYSGDDLVSFFNSNAAQIAIQGGSAELGTAFHHARIYRCWTVGKNGKKKIFFGMIRVYQHDLLHAKNEDLFTYPLKRSSVSMRYAKKEVVHAILSGNAEYVGYLCVGDELVLDLKGDKSNDEGGSRLSGQVGEFVQKFEEDSKVNSQIVNRWTVDGFPDEAKLRLRPSMFAGEGLKNMKSELVENAAIKNILSKTGWRVSVDVISKKSPVVLRRNAFGEPRWKTNAGLPVSYRWQDTETKE

SEQ ID NO: 161 - protein, 1371 aa, Gordonibacter pamelaeae
MNLRNVESYQVGLDIGTGSVGWAVLDDNGDLCRFKGKPTWGSRVFPTAETAAEARVHRGQRRRYDRRRQRIDLLQRFFADEVAKVDPEFFIRLNQARLHPENRDPAHADYRWPLFNGSNFTEKDYYRQFPTIYHLRAHLLKSDEPADIRLVYLALHNIVKHRGNFLHQDNPSLSARNANVGDAVEALCLALDEWCGAHDVECACDEAALAEALGDASLRPGEKRERAEAALGVEKAHKKLAKAVSSAVVGYAAEFGHVFFAESEGSKFALSNDEKVEAYVCPDEGRDLFDAMRAVHSSYVLMGILSEAQGELLSVCKVGEYERYKRDLETLKSLVRAYGPERYDEFFCGPFYEGTRDYDPGKAQGYTKYNLGASKLSHEDFLKEVQKLLKDIGAQADERYADIERAIEAGAFLRRLKTSDNGTIPYQLHLEEMDAIIERQAAFYPFLAQEKDKLKSLVSFRIPYYVGPLTQKNAARDGKGEARFAWSSRKPGMEDARVYPWNWEDVIDKDQSAEDFIRRMTGTCTYLKGEPVLARCSLDYELFCVLNELAGARWTQDGDKSYRFDAADRLGIVEDLFKKRKRVTYEAAEKWLARTHGPESGKSAGGAYHVSGGQGEDAFESQLSSHYDFCKILGVDELSDADEAMAEDIILWNTVFEDRSILKRKIKLAYGDRLGDAQVRKLCQKRYTGWGRLSGELLRGLRSATDNGPKTIMDILLEGDPNHARRMGAAMNLMEILHDDLLEFQAKIDEHNRERALAVGGMSVDEVTGSPALRRGINQALRVVDEIAGIAGKPPAHIYVEVTRDEGARNKGRRTTSRYRALEAALSSIKAQCADVYAELKERDPRALDDERLTLYFMQCGKCMYSGDALDINKLQTYQVDHILPQSYVKDDSFENKVLVRPDTNQRKGDTLLLDERLIARMRGFWRTLRDAELIGEKKFNNLTRTSVSDEQMKKFVSRQLVETGQMVKQVQQLLQARYPESEVQPVKAGVSHQLRVGCALAKSREINDFHHAHDAYLACQVGRFVQYRHSAVYSEPVKMAAVVKQFIKKQAEDYRRTRELPGSDGFIVSSFMTPGFDVKTGEVFRDAWDAGAEIDRIRRCFDYKDCFISRMPEETHGAFWDATIYSPRAAGKTLSLPLKRGLDPRKYGSYSREQFAYFFVYEAVKPKKKQRVLEFAPVPVRVASALANDPDALEDYARELAEAEGLVFERIRRRKVYKYQQIIVGDSRLYVTGREEVRNARQLAFSQDETKLICRIEQGEECEEGELLDLFRSMQRKYLACAPRLARLMKVAEMEEGFIAATASGKREVLLSLTSIAAAHRNSIDLKPIGRKGSSGQMKITFSKELSTNGILFVDSSVTGMFERRCRLGL

SEQ ID NO: 162 - protein, 1388 aa, Zunongwangia profunda
MKRILGLDLGTNSIGWALVNEAENEKEISKIIKLGVRVNPLTIDEKTNFEKGRPLSTNADRTLKRGARRNLQRYKLRRENLIEILIDNHIITKETPLTEIGKGTTYQTLSLRAKAVRERIDLEDFAKVLLAINKKRGYKSSRKASNDEEGQAIDGMAIAKELYERGITPGQYVLELLENDRKYIPDFYRSDLKQEFNKIWNNQKTFYPEILTDELFKELDGKNKSQTWAICQKPFNIKGIKRITKGREKTIENYHWRVKGLSGKLNLEKLAIILQEINNDINQSSGYLGGISDKSKKLYLNKETVGEFLYKQIAKNPHTSLKNQVFYRHDYLDEFEQIWKTQSNFNANLTDELKQEIRDVIIFYQRKIKSQKSLISFCQFESWEQEYFDKETGKTKTRTVGRRVIPKSSPLFQEFKIWQNLNHLVFTNSETDEKIEIKEVEQEIRKELFEELNLRGDLNPNDLLKILRSQFKIGKLSNWKCNFEKIEGNRTNAALFNIYQKISDFEGYGIDWNKSNAKKIRKELKATFPEIGIDASILEFDAYKKQLTNQSSYELWHLLYSAEEDFKISEQDKLIYGNSSVSLKKKLHLKFGFNPEYAKMLANLSLMSDYGNLSAKAIKKILPYLEDGHLYSEACRLAGYNHSKSLTAEELEKFEPKAKLDLLKKNSLRNPVVEKILNQMVNVVNQVIDTYGKPDGVRIELARELKKSAKERAEMTKGIADGTRRNEEIKKIITQKFGIPNPTKSDLVRYRLWQELESRGYKDIFTDKYISPDKIFSSEIDIEHIIPKALLFDDSFSNKTLSFRNVNLKKANRTALDFITQDYQSNVEAYKERVETWNKDNHISKGKRNKLLMSLKDIPDGFIERDLRNSQYIARKAKRMLYEVFPNEVLATSGSITDKLRSDWDLINVMKELNLPKYKALGLTEYEERLDKGTEELFKHEVIKDWTKRNDHRHHAMDALAVAFTTHNHIQYINNLNARKDITQDNHPIIKNIENLITEVNSKGKRVFKAPMSSFRESAKEQIEAILVSFKNKNKVVTKNINQTKKEGGFNYQNAKTPRGQLHKETIYGKSKQPLEKPVKINNRFCKKQVGLIINFKEQEAVLHHLKKYDNNEKIAFSNKTLKSDPIQVNGSPLREVKIFEEIFTIRKDINPDNFKTQKHLDKIIDKGIKEVMKKRLEEYNGDFKTAFSDLDKNPIWLNQSKGITIKRATISGVTNAEPLHQAKDHLGNIILDDNGKEIPIDYVSTGNNHHVAIYQDESGNLQEEVVSFYEAVIRKNQDQPIIKKRHPKGWKFLFTMKQNEMFVFSSENFNPSEIDLLDEKNAAIISPNLFRVQKIATKNYMFRHHLETEVTNNLDFTYRHFQATEWLRNLCKVRIDHIGRIVQIGEY

SEQ ID NO: 163 - protein, 1082 aa, Methylosinus trichosporium
MRVLGLDAGIASLGWALIEIEESNRGELSQGTIIGAGTWMFDAPEEKTQAGAKLKSEQRRTFRGQRRVVRRRRQRMNEVRRILHSHGLLPSSDRDALKQPGLDPWRIRAEALDRLLGPVELAVALGHIARHRGFKSNSKGAKTNDPADDTSKMKRAVNETREKLARFGSAAKMLVEDESFVLRQTPTKNGASEIVRRFRNREGDYSRSLLRDDLAAEMRALFTAQARFQSAIATADLQTAFTKAAFFQRPLQDSEKLVGPCPFEVDEKRAPKRGYSFELFRFLSRLNHVTLRDGKQERTLTRDELALAAADFGAAAKVSFTALRKKLKLPETTVFVGVKADEESKLDVVARSGKAAEGTARLRSVIVDALGELAWGALLCSPEKLDKIAEVISFRSDIGRISEGLAQAGCNAPLVDALTAAASDGRFDPFTGAGHISSKAARNILSGLRQGMTYDKACCAADYDHTASRERGAFDVGGHGREALKRILQEERISRELVGSPTARKALIESIKQVKAIVERYGVPDRIHVELARDVGKSIEEREEITRGIEKRNRQKDKLRGLFEKEVGRPPQDGARGKEELLRFELWSEQMGRCLYTDDYISPSQLVATDDAVQVDHILPWSRFADDSYANKTLCMAKANQDKKGRTPYEWFKAEKTDTEWDAFIVRVEALADMKGFKKRNYKLRNAEEAAAKFRNRNLNDTRWACRLLAEALKQLYPKGEKDKDGKERRRVFSRPGALTDRLRRAWGLQWMKKSTKGDRIPDDRHHALDAIVIAATTESLLQRATREVQEIEDKGLHYDLVKNVTPPWPGFREQAVEAVEKVFVARAERRRARGKAHDATIRHIAVREGEQRVYERRKVAELKLADLDRVKDAERNARLIEKLRNWIEAGSPKDDPPLSPKGDPIFKVRLVTKSKVNIALDTGNPKRPGTVDRGEMARVDVFRKASKKGKYEYYLVPIYPHDIATMKTPPIRAVQAYKPEDEWPEMDSSYEFCWSLVPMTYLQVISSKGEIFEGYYRGMNRSVGAIQLSAHSNSSDVVQGIGARTLTEFKKFNVDRFGRKHEVERELRTWRGETWRGKAYI

SEQ ID NO: 164 - protein, 1186 aa, Gardnerella vaginalis
MEGNISYAIGIDVGLNSVGLAAIRLDNNGEPIRILKAMSVIHDAGIDPNGAKESDTRKAISGVARRVRRLYRQRRRRLQKLDFLLHSLGFPVVENKDLDFSDSFTPWIFRAKLADEYIADEKQRKQMLSVAIRHIARHRGWRNPYQSIKSMTQETEYSEFYNELLKNIEKFAPGVSCEGSTPAQLVRDYLLSQQGKASRRLRITTDDRRKNHPNSLDPVLPRKLMQSDNMLEILNIFNVQHIDNKYVREQIINAVFYAKSPRGSAENRVGKDAITGKGKRALKASLAFQKYRIISTISNLRIRENSKERCLTIEEKQSVYKLLTTSTDEYSKEKSAEAPLYTWIDVADCLGIERYKLRGVGSQIEDGESVGNRPPMLNSELAILYANAKSLKQSLITWWLAANRTQEDKEAFIEILSNTVDIEAIHDNPEYQDKYGSVIAFIDSMDETEIAALENISLPNGRAAYSLETLDKLNKQMLETDDDLFEARKKLFNLPNNWRPSEAPIAEPTGNPSVDRVLKIVHRFLISAKNRWGNPERINIEHVRSGFQSKKMANSYKKLLDKRTEGKENLKAMMRNSLHLGTSDSISDADIRRYEAVQRQNGQCLYCGSEITYHTCELDHIVPRKGPGSTNTRENLVATCSSCNAQKCNTPFATWCEESTYCKNHDISVDSAINRVRAFIFPPNSYDKRGASQFKKEVIARLKQKVGDEAFDNRSIESVAWMANELHRRIDWYYNSQNYQTNNGISDITNKAQTNVGVYAGSLTAIARRMSGIDGKLEFFDGRRKTRFDRRHHAVDASVIAMMTPGIAQILAIKCNLRETQLLQGNKVVPGGIDWKEYPTANDQGYQQYANWSVRMNALLELLNEEMRADRIAVVNSIRLRYSNSSVHKDDVHALLKLHVGDEIDSETIRRASTPALYCALTRNPDYDVNNGLPENTDRTILLHDKKLNADDSITFFKSKAAQLFVREGSVEIGNSIHHLRIYEYFEKLKSGKVKKSYGMIRVFQDDLHRYIHEDLFSCDLPEQSISMRYADTKVAHAVQTGNANYLGYLVPGDEIIVDFSHVKLSGYIGEFVEFLNKIGANCAAYKHWVVAGTDDKTTLILKPSMISSEGIDKLYSNCERNNFDYASYEKSIDKILVDKGWRVSVNVLDQYKAATIRRNALGEPRWASRSHLPISWSWDTGENRE

SEQ ID NO: 165 - protein, 1434 aa, Bacteroidetes oral
MKNILGLDLGTNSIGWAYVKQAQNDSEKSEIAELGVRVNPLTVDEKTNFEKGKPISTNADRTLKRGARRNLQRYKLRRQELIELLKDYQVISDKTILAEDGKETTFETLRLRVKSAKEQVSLEELARILLMINKKRGYKSSRKAKNEDEGQLIDGMEIARRLYDENLTTGQLSLQLLKEGKKSLPDYYRSDLQHELDKVWNFQKQFHPDILTDEFYTSIQGKGQKATRESFSSKYGIDTAENKGSREEKKLQAYQWRADATHKELTKEELAFVITEINNNINNSSGYLGAISDRSKELIFANETVGEYLWKQIQNDPHTSLKNQVFYRQDYFDEFERIWETQSGFYPQILTESLKNELRDILIFYQRKLKSQKALVSICEFESKEIPLKDKQGNPISKNGIPVTKLVGPKVAPKSSPLFQEFKIWQNLNNVLVRPKGSRKRKVTTNQQSTLLEGQEPVFELNLEQKELLFEELNLKGNLKTDYCLELIGYSAKEWEMNYPTLEGNKTNKALYEAYLKIIDSEGYDAKKLLKVKTDKDDINLDDIKVSASEIKTMISDIFNELGINTKILDFDAELERKQFEAQASYRLWHLLYSYEGDDSKSGNELLYRLLEDKFGFKREHSKTLANVSLLSDYGNLSTKAIRTIYPYIKENKFSTACELAGYRHSKLSISKEENENRTLKDTLDVLKKNSLRQPVVEKILNQMINLINELIEKHSEKDEKGNIVKYFKFDEIHIELARELKKNAEERRELDSKVREGKDRNEKIITILKSEFGLPYPTKNDITRYRLYEELKDNGYKDLYTNTYIPREKLFSKEIDIEHIIPKSRLFNDSFSNKTICYRQDNLNKGERTAYDYIEGLGKTQLDEYLNRVENLYTNKFITKAKYRNLLKKESEIGDGFIERDLRETQYIAKKAKEMLLQITRHVVSTTGSITDRLRDDWELVNVMRELNLPKYKVLGLTEIQERKNGQTVEVITDWTKRNDHRHHAMDALTVAFTKHSHIQYLNFLNARKDEKHKEYSNIMGIQQLETEKTTDKDGKDRRVFKTPIPNFRQVAKEHLESILISHKTKNKVVTRATNKIAGSKKQQETLSPRGQLHKETVYGKYRRYVQKEEKIGSKFDLQTIERVANPLYKRLLTKRLEENGGDPKKAFTGKNALAKSPIYLDETQTQQLPEKVKLVWLETDFSIRKDITPDNFKDEKSIDKVLDEGIKRILKDRLKSFDGDAKRAFTDLEQNPIWLNKEKGIAIKRVTISGVSNAEPLHTKKDHLGNEIFDDTGKPIPVDYVSTGNNHHIAIYRDENGNLQEKAVSFFEAVTRANQGLPTVDKTYNQHLGWQFLFTMKQNEMFVFPNKETGFDPQEIDLLDPKNKKLISPNLFRVQKISTKNYFFRHHLETSVETHNALNGVTYKSQLGLNGITDIIKVRINHLGDIVHIGEY

SEQ ID NO: 166 - protein, 1341 aa, Peptoniphilus sp.
MWGSRLFEEASTAQDRREHRSNRRRLERRKYRLDLLEELFVEEINKIDPEFFIRLRESKFHFEDRSLKNTFILFNDKMEGGYNDKVFFSKYPTIYHLRSALINGNKEDVRAVFLAIHNILKNRGHFLLAGNDINISLSLNDTLTDLFEYLKIHLGIEVEFENKLKDIEKIALDKNLSKSDKQKKIVQLLETDYKKQLADVFKLSLGLTANMENIFGKENEQGLEFINAENKIKKIQFDSSYEENIAEFDQFYGEYFEIIDICKKIYDAISLSQILVDGKGLSESKVLSYEKHKEDLKLLKKVLKNIDKAYDNKGEDRLVYKVLKEDKDKGTNYVNYSKLSNNGTATTKEEFYKFLSKNLDLKKFGKLNKEDIETLDYINSEILLGRFLPLQKEKINGVIPYQLQMKELTQILNNASKYLPFLNKIEDGMTVKDKIISLIKFRIPYYVGPLNEYNRIENGNGFAWIEKKKNEKIFPWNFNDVVDIEKSAEKFINNLTNKCTYIKEETVLPKNSIIYSKFMVLNELNNLQYGNKKLDIELKMKMYTDLFLEKKDNRKVTEKRILEYFRINGINDGKEKLTGLNNEIHADMKSYRDMCEIMGENFNINVAENIINWITVFHGEKKILINKIKNVYGKMFNDEQISKLSKLNYSDWGRLSKKLLTDIKCYIDADGINFPVSILEAMEVSNKNLMELLSNKYEFISCIDDINNKYFGDRDISASELIDELYVSPAVKRGIWQSVRILEEIVSIIGHNPKKIFIEMTRHNEEKVQKSSRRHNLEELYKAIRKDPEYVELIKEFDSTTDTDSFKIKKLYLYFMQLGKCAYSKEKIDFDKLFTDSYDIDHIYPRSKTKDDSIHNNLVLVKAKYNREKTDVYPIDINIQKNMNSFWNFLYTKKFITEEKYKRLIRTSDLTDEELAKFISRQLVETSQSTKATAEVLKQIYGDSDICYVKAENVSDFRYGSSRQKDKNDIQKLFVKCREVNHFHHAKDAYLNIVVGNVYDVKFTKNPVNFIKKNKMGNKSNYSLNHMFCFDVERNGYKAWDSSETIKTVGRMMKSNDVRITKHVHPTRGELYDATIYKAKIAKTGSYMPLKSSKNTPLSDVTKYGGYTKIKIAYYSVYKYKFSDKNLIKTEIRLIPIPIYLSKNDDDIKEYVKNYLNDRVNSKLIDFTKIYDKLYVNSLIKINGYLYYLGGKTNDRVWIDNAVSIVLDDKIEYLIKRISNDIKYGYEINVSDDELMDIYESLAEKANKKIFYNRLSDFEKIFSNMDVKKKFVKLEKNDKCRVLLQLLNVLTDSQTTYKLEMVGLKHSRSNIGMKISNLEEFKVINSSITGLYSNEIDILNI

SEQ ID NO: 167 - protein, 1391 aa, Lactobacillus gasseri
MTKIKNEYIVGLDVGTNSCGWVAMDFQNTILRMHGKTAIGSHLFDAGNSAADRRAFRTTRRRIKRRKWRLKLLEEIFDPYMTEVDPYFFARLKESGLSPLDKRKNVSSIVFPTALEDKKFYCNYPTIYHLRYDLMSEDKKFDLREIYLAIHHIVKYRGNFLYNTPVKDFEASKIDVKDSLEKLNELYERLDSEFTVELDSSNALEIEKIIRDKKVFKINKVKSIHQLLSLKTENKERTKLIKDVSKQIINAILGYKTKFETILLKNISKDEADDWEFKLTDVDADNKFENLIGDLNENEQEILLEIRNLANAITLSNIVEEGKTLSESMIDKYNKHSDDLELLKQVISDHPDRDKAKKLALAYDLYVNNRHGKLLQAKDVLGSKKTLSKEDFYKEVKKNLDDSKASQEILDTIALDSFMPKQRTNENGVIPYQLHQLELDRIIKNQGKYYPFLKEVNPVSSHLKEAPYKLDELIRFRVPYYVGPLISPNESTKNKQTKKNQNFAWMIRKEQGQITPWNFDQKVDRMASANKFIKRMTTKDTYLLGEDVLPANSLLYQKFTVLNELNNIKINGKRISVPLKEELYNNLFKKNSTVTTNKLKSYLKENYNLINVEIKGLADEKKFNSGLTTYNKLRNLKIFDQQLDDLNYDKDFERIIEWSTIFEDKAIYKDKLKTIKWLSDRQIDKLSKIRMQGWGQLSKKLLSQLTDNNGQTIIEQLWDSQNNFMQIVNQSDFKDAIAVANQNLLVNTSVEDILNEAYTSPANKKAIRQVVKVVDDIVKAASGKVPKQIAIEFTRDADDKAKISQTRANKLRKVYKELSNELASETIRNELERVAKDQKLLKDKYYLYFMQLGRDAYTGEPINIDDLGQYDIDHILPQSFIKDDSLENRVLVKKAVNNGKSDNVPVKLYGNRMAADLGMTIRHMWEKWKDQGLITKTKYNNLIIDPDKINKYESSGFIHRQLVETSQIIKLVSTILQSKYPDTEIIVVKARYNHYLRKHLNLYKSREVNDYHHAIDAYLSAICGNLLYQVYPYLRPFFVYGQYKKFSSDPKKEKIIYDKTRKYNFISQIFENKSNDIISLETKKKVFDKKDIIEKLKHAYNYKYMLVSRETETHDQEMFKMTVYPRLSRDTKKSRNLISKKKDMPTEIYGGYTNNSDAYMVIARINKKKGTEYRVFGVPMRELVNLRKAEKNGRYNAYLKQVLEPEIMYSKNGKKNKTISSFEIVKAKVPYKQVILDGDKKFMLASSTYVQNAKQLTLSQNSMQAITDNCENDTEEEKALEEKALIEAYDEILTNIDKYLPLFDINKFREKLHAGREKFINLSLDVKKDTILQVLNGLHDNAVMPKIKSLGLSTPLGFMQFSSGVPLSENAKLIYQSPTGLFEKRVKISDL

SEQ ID NO: 168 - protein, 1426 aa, Sphingobacterium spiritivorum
MKHILGLDLGTNSIGWALIKQDFENKQGEILGMGSRIIPMSQDILGDFGKGNSVSQTAERTKYRSVRRLRERFLLRRERLHRILNVLGFLPEHYASQIDFTKRFGKFKEETEPKLVYSNEGFIFKKSFEEMLSDFKTHQPQLLEDNKKIPYDWTIYYLRKKALSRKIEKEELAWILLNFNQKRGYYQLRGEEEEENPNKLIEFYSLKIVDVLADEPQKGKSDIWYSLILENGWIYRRSSKTPLFDWKEKTRDFIVTIDLNDDGSVKTDKEGNEKRSFRAPGENDWTLVKKKTEQEIDSSRKTVGTYIYETLLKNPKQKIKGKLVRTIERKFYKTELKQILEKQKEFHPELRQDDLYSDCVRELYKNNEAHQLTLSKKDFVHLFMEDIIFYQRPLGSQKSSISNCTLEFRKYKDENGTEHTQYLKAIPKSNPYYQEFRIWQWMYNLNIYKKEDDTNVTKDFLNTKADFESLFEFLNNRKEVDQKALLKHFKLNDKTHRWNYVEDKKYPCNETKTMILSRLDKVENISDDFLTREMEQKIWHIIYSVNDKVEYEKALKSFAGKNNLEDNSFFEAFKKFPPFKSEYGAFSEKAIKKLLPLMRMGKFWNYNNISEQSKSRIQKIITGEYDENIKDKVREKAIHLTTETDFQGLQLWLVQYIVYGRHSEAAMLGKWNSADDLEEFLKEFKQHSLRNPIVEQVITETLRVVKDIWQKYGNGAKDFFREIHIELGREMKLPAEERERLTRQISENENTNFRIKALLAEMMDDNSVENVRPFSPMQQEILKIYEEGVLNSDIEIEDDILKISKTAQPSSSDLKRYKLWLEQKYKSPYTGQIIPLNKLFTPEYEIEHIIPQSRYFDDSFTNKIICESAVNKLKDNYIGLEFIKKLGGSIVECGNGKSVAILKHDAYEDFIKKHYANNRSKRNKLLLEDIPEKMIERQMNDTRYISKYISGVLSNIVRVEDGTDEGVNSKNIVPGNGKITTQLKQDWGLNDVWNDLILPRFERMNHLTNSTDFTAWNENHQKFLPTVPVEFSKGFSKKRIDHRHHALDALVIACATKDHVNLLNNQSAKSDTKRYDLKKKLMKFEKVAYNHPQTGERIEREAPKQFLKPWETFTIDAKNHLETIIVSFKQNLRVINKATNYYEKYVEKEGTKVKERVEQKGTNWAIRKPMHKETVSGKIDLPRIKVPKGKILTATRKSLDTSFNLKTIGSITDTGIQKILKNYLQYKDNNPELAFSPEGIEDMNKNIEKFNNGKAHQSISKVRVFELGSKFPLGQSGNKKEKYVEAAKGTNLFFAIYQDKNGKRSYETIPLNEVIERQKQGLSVVDLKGVDDFYLSPNDLVYVPSEDELENISMIDFNKMSSERIYKVVSFTGNQIFFVRQDIATSVVNKAEFSTLNKMERAIDGTMIKETCVKLQIDRLGNISKI

SEQ ID NO: 169 - protein, 1361 aa, Lactobacillus casei; identical to SEQ ID NO: 85

SEQ ID NO: 170 - protein, 1436 aa, Bacteroides fragilis
MKRILGLDLGTNSIGWALVNEAENKDERSSIVKLGVRVNPLTVDELTNFEKGKSITTNADRTLKRGMRRNLQRYKLRRETLTEVLKEHKLITEDTILSENGNRTTFETYRLRAKAVTEEISLEEFARVLLMINKKRGYKSSRKAKGVEEGTLIDGMDIARELYNNNLTPGELCLQLLDAGKKFLPDFYRSDLQNELDRIWEKQKEYYPEILTDVLKEELRGKKRDAVWAICAKYFVWKENYTEWNKEKGKTEQQEREHKLEGIYSKRKRDEAKRENLQWRVNGLKEKLSLEQLVIVFQEMNTQINNSSGYLGAISDRSKELYFNKQTVGQYQMEMLDKNPNASLRNMVFYRQDYLDEFNMLWEKQAVYHKELTEELKKEIRDIIIFYQRRLKSQKGLIGFCEFESRQIEVDIDGKKKIKTVGNRVISRSSPLFQEFKIWQILNNIEVTVVGKKRKRRKLKENYSALFEELNDAEQLELNGSRRLCQEEKELLAQELFIRDKMTKSEVLKLLFDNPQELDLNFKTIDGNKTGYALFQAYSKMIEMSGHEPVDFKKPVEKVVEYIKAVFDLLNWNTDILGFNSNEELDNQSYYKLWHLLYSFEGDNTPTGNGRLIQKMTELYGFEKEYATILANVSFQDDYGSLSAKAIHKILPHLKEGNRYDVACVYAGYRHSESSLTREEIANKVLKDRLMLLPKNSLHNPVVEKILNQMVNVINVIIDIYGKPDEIRVELARELKKNAKEREELTKSIAQTTKAHEEYKTLLQTEFGLTNVSRTDILRYKLYKELESCGYKTLYSNTYISREKLFSKEFDIEHIIPQARLFDDSFSNKTLEARSVNIEKGNKTAYDFVKEKFGESGADNSLEHYLNNIEDLFKSGKISKTKYNKLKMAEQDIPDGFIERDLRNTQYIAKKALSMLNEISHRVVATSGSVTDKLREDWQLIDVMKELNWEKYKALGLVEYFEDRDGRQIGRIKDWTKRNDHRHHAMDALTVAFTKDVFIQYFNNKNASLDPNANEHAIKNKYFQNGRAIAPMPLREFRAEAKKHLENTLISIKAKNKVITGNINKTRKKGGVNKNMQQTPRGQLHLETIYGSGKQYLTKEEKVNASFDMRKIGTVSKLAYRDALLKRLYENDNDPKKAFAGKNSLDKQPIWLDKEQMRKVPEKVKIVTLEAIYTIRKEISPDLKVDKVIDVGVRKILIDRLNEYGNDAKKAFSNLDENPIWLNKEKGISIKRVTISGISNAQSLHVKKDKDGKPILDENGRNIPVDFVNTGNNHHVAVYYRPVIDKRGQLVVDEAGNPKYELEEVVVSFFEAVTRANLGQPIIDKDYKTTEGWQFLFSMKQNEYFVFPNEKTGFNPKEIDLLDVENYGLISPNLFRVQKFSLKNYVFRHHLETTIKDTSSILRGITWIDFRSSKGLDTIVKVRVNHIGQIVSVGEY

SEQ ID NO: 171 - protein, 1517 aa, Bacteroides sp.
MKKIVGLDLGTNSIGWALINAYINKEHLYGIEACGSRIIPMDAAILGNFDKGNSISQTADRTSYRGIRRLRERHLLRRERLHRILDLLGFLPKHYSDSLNRYGKFLNDIECKLPWVKDETGSYKFIFQESFKEMLANFTEHHPILIANNKKVPYDWTIYYLRKKALTQKISKEELAWILLNFNQKRGYYQLRGEEEETPNKLVEYYSLKVEKVEDSGERKGKDTWYNVHLENGMIYRRTSNIPLDWEGKTKEFIVTTDLEADGSPKKDKEGNIKRSFRAPKDDDWTLIKKKTEADIDKIKMTVGAYIYDTLLQKPDQKIRGKLVRTIERKYYKNELYQILKTQSEFHEELRDKQLYIACLNELYPNNEPRRNSISTRDFCHLFIEDIIFYQRPLKSKKSLIDNCPYEENRYIDKESGEIKHASIKCIAKSHPLYQEFRLWQFIVNLRIYRKETDVDVTQELLPTEADYVTLFEWLNEKKEIDQKAFFKYPPFGFKKTTSNYRWNYVEDKPYPCNETHAQIIARLGKAHIPKAFLSKEKEETLWHILYSIEDKQEIEKALHSFANKNNLSEEFIEQFKNFPPFKKEYGSYSAKAIKKLLPLMRMGKYWSIENIDNGTRIRINKIIDGEYDENIRERVRQKAINLTDITHFRALPLWLACYLVYDRHSEVKDIVKWKTPKDIDLYLKSFKQHSLRNPIVEQVITETLRTVRDIWQQVGHIDEIHIELGREMKNPADKRARMSQQMIKNENTNLRIKALLTEFLNPEFGIENVRPYSPSQQDLLRIYEEGVLNSILELPEDIGIILGKFNQTDTLKRPTRSEILRYKLWLEQKYRSPYTGEMIPLSKLFTPAYEIEHIIPQSRYFDDSLSNKVICESEINKLKDRSLGYEFIKNHHGEKVELAFDKPVEVLSVEAYEKLVHESYSHNRSKMKKLLMEDIPDQFIERQLNDSRYISKVVKSLLSNIVREENEQEAISKNVIPCTGGITDRLKKDWGINDVWNKIVLPRFIRLNELTESTRFTSINTNNTMIPSMPLELQKGFNKKRIDHRHHAMDAIIIACANRNIVNYLNNVSASKNTKITRRDLQTLLCHKDKTDNNGNYKWVIDKPWETFTQDTLTALQKITVSFKQNLRVINKTTNHYQHYENGKKIVSNQSKGDSWAIRKSMHKETVHGEVNLRMIKTVSFNEALKKPQAIVEMDLKKKILAMLELGYDTKRIKNYFEENKDTWQDINPSKIKVYYFTKETKDRYFAVRKPIDTSFDKKKIKESITDTGIQQIMLRHLETKDNDPTLAFSPDGIDEMNRNILILNKGKKHQPIYKVRVYEKAEKFTVGQKGNKRTKFVEAAKGTNLFFAIYETEEIDKDTKKVIRKRSYSTIPLNVVIERQKQGLSSAPEDENGNLPKYILSPNDLVYVPTQEEINKGEVVMPIDRDRIYKMVDSSGITANFIPASTANLIFALPKATAEIYCNGENCIQNEYGIGSPQSKNQKAITGEMVKEICFPIKVDRLGNIIQVGSCILTN

SEQ ID NO: 172 - protein, 1399 aa, Olsenella uli
MNLRNTTDEYNIGLDMGTNSVGWAVTDKAGAIAHFKGKPTLGSRLFDAAQTAAGARIHRSQRRRYVRRRWRLDLLQSLFQDEVSKVDSEFFCRLRQSRLYVGDREKGHADYTWPIFNDSDFNEVDYYKRFPTIYHLRKWLMETDEKADIRLIYLATHNIVKHRGNFLRENNKSLSSRDANPAQAVKSLRLALNDWCSERDYECAWKGEEDDGAIDEAILNVLADGEKGRSDQAKEIAKLTGVDCGDAKQSKQCNEAIAKAIVGLKVEMKNIFGEFPAEKTSYIYLSSDEDVEAVRESCPDDSGELFQALCKLYSAYILQELLSYADPSGQTISANMVAKYKQYGRDLRLLKELTRTYAPQKYDLFFRGETYAGSSDYVVDEARGYTRYNLGTTKANYDDFQKSVKELFKGTDALQDERYQEMMVAFGEQKFLRRLKTSDNGSIYYQLHLEELHTILENQGKHYPFLLSEEDKIESLVSFRIPYYVGPLTRKNAAIGHDGKERFAWSSRKDGMEHAVITPWNWEEIIDRDKSAEDFIMRMTGDCTYLQGEPVLPKCSLLYEEFCALNEFNGAHWTVDGDDERRFDAAQRERIMCDLFRRTRSVTYNKVSDWLERKYNFTGARVRGGQGEHGFESKLGSYIFFCKDVFKTDGLDEADYTMIEQIILWSTLFEDRDILKRKIEEAYGGDRLTSEQIKVICKKRFTGWGRLSKRLLTDIKVNTDTGRKSIMDVLREGNPNNGQRSRTMVFMEVLRDEDLGFQKAIDGLNRDYFREHNNGLMDVNDLPGSPAIRRSINQAVRIVDEIASIARKEPTNIFIEVTREEDDPRKKGKRTKRRYDAIKSALEKFKKDDPSLWKELCEKAPGDMDERLSLYFMQRGKCMYSGRPIKIEELHTGKYEVDHIIPRSYIKDDSFENKVLVYREENQHKTDALLIDSSIRQKMGGYWRMLHDAKLVGDKKFRNLFRNHIDDKAMKGFVARQIVETSQMVKLVQTLFEARYPNTRIVPVKAGISHDLREAAGLVKCREANDFHHAHDAFLACRIGLFIQKRHPSVYDNPIGLARIMRDYARMQAREYKKSHCLAHTQGFIVNSFLSSGFDEETGEIFKDDWDAKAEVEGIRRVLNCRQCFISRMPVEGDTRYGGRYWGETIYSPKGKHKHEIPLKQGLDPNLYGGYSDLLYSYFLIYEASDVSSGERVLRFIGIPTSIAARMANQKRLEEYVSRLALQENLEHVRMVRKIMKKQLIEVDNCRLLVTAADAVTNATELAFSLDEMKIISTCAKCINGADPSAIDKIGNAQDSFFDNLKRRGSDRCALLFSQLKLDKLSQNFYMISSDDKSKILISILDRIRAKSNSVDLSLVGGAKHAAQMKFDFNAKLNNPASSFVLIDQSVTGMFERRTRIGL

SEQ ID NO: 173 - protein, 1398 aa, Veillonella atypica
METQTSNQLITSHLKDYPKQDYFVGLDIGTNSVGWAVTNTSYELLKFHSHKMWGSRLFEEGESAVTRRGFRSMRRRLERRKLRLKLLEELFADAMAQVDSTFFIRLHESKYHYEDKTTGHSSKHILFIDEDYTDQDYFTEYPTIYHLRKDLMENGTDDIRKLFLAVHHILKYRGNFLYEGATFNSNAFTFEDVLKQALVNITFNCFDTNSAISSISNILMESGKTKSDKAKAIERLVDTYTVFDEVNTPDKPQKEQVKEDKKTLKAFANLVLGLSANLIDLFGSVEDIDDDLKKLQIVGDTYDEKRDELAKVWGDEIHIIDDCKSVYDAIILMSIKEPGLTISQSKVKAFDKHKEDLVILKSLLKLDRNVYNEMFKSDKKGLHNYVHYIKQGRTEETSCSREDFYKYTKKIVEGLADSKDKEYILNEIELQTLLPLQRIKDNGVIPYQLHLEELKVILDKCGPKFPFLHTVSDGFSVTEKLIKMLEFRIPYYVGPLNTHHNIDNGGFSWAVRKQAGRVTPWNFEEKIDREKSAAAFIKNLTNKCTYLFGEDVLPKSSLLYSEFMLLNELNNVRIDGKALAQGVKQHLIDSIFKQDHKKMTKNRIELFLKDNNYITKKHKPEITGLDGEIKNDLTSYRDMVRILGNNFDVSMAEDIITDITIFGESKKMLRQTLRNKFGSQLNDETIKKLSKLRYRDWGRLSKKLLKGIDGCDKAGNGAPKTIIELMRNDSYNLMEILGDKFSFMECIEEENAKLAQGQVVNPHDIIDELALSPAVKRAVWQALRIVDEVAHIKKALPSRIFVEVARTNKSEKKKKDSRQKRLSDLYSAIKKDDVLQSGLQDKEFGALKSGLANYDDAALRSKKLYLYYTQMGRCAYTGNIIDLNQLNTDNYDIDHIYPRSLTKDDSFDNLVLCERTANAKKSDIYPIDNRIQTKQKPFWAFLKHQGLISERKYERLTRIAPLTADDLSGFIARQLVETNQSVKATTTLLRRLYPDIDVVFVKAENVSDFRHNNNFIKVRSLNHHHHAKDAYLNIVVGNVYHEKFTRNFRLFFKKNGANRTYNLAKMFNYDVICTNAQDGKAWDVKTSMNTVKKMMASNDVRVTRRLLEQSGALADATIYKASVAAKAKDGAYIGMKTKYSVFADVTKYGGMTKIKNAYSIIVQYTGKKGEEIKEIVPLPIYLINRNATDIELIDYVKSVIPKAKDISIKYRKLCINQLVKVNGFYYYLGGKTNDKIYIDNAIELVVPHDIATYIKLLDKYDLLRKENKTLKASSITTSIYNINTSTVVSLSNKVGIDVFDYFMSKLRTPLYMKMKGNKVDELSSTGRSKFIKMTLEEQSIYLLEVLNLLTNSKTTFDVKPLGITGSRSTIGVKIHNLDEFKIINESITGLYSNEVTIV

SEQ ID NO: 174 - protein, 795 aa, Prevotella disiens
MEKQRILGLDPGTNSLGWAVLDFDNSKQEYNLVRKGEVIFEEGVGKSKRGEFSKAAYRTFYKSTRKHYFRRRLRKIEVLKVLVKYDFCPYLSDDLLKQWHEKKIYPAVKEFMDWQRTSDAEGKNPYYDRHCCLNEKLDLSLKSDRYVLGRALYHLTQRRGFKSNRLIQNNDENEEGKVKKGISELSTEMQEANCNYLGDYFYKLYTEKGNTVQIRKRYTDREKHYKNEFNAICEKQELNETIVKELDKAIFFQRKLKPQRHGVGKCTFEPNNRRCAISHPDFERFRMLCFINNIKIKTPFEENLRPLNNEEKALIEPLFYRKSIKNFDFEEIAKKLAGKNNYCYIKDDSSKQYKFNYRMSQGASTCQTIAKLKSIFGEEWKNGIAETYTNRRKKEGLKKQAEMVDDIWNVLYSVSECDVLKDFAINKLQLDEKTADNFSKTKLAQGFATLSLKAIRKILPFLEQGFGYTEAVFLANIPTVVGKEYWNNEDIRNDIMEEIKTIFYHNTLKTNDSHNTILFCIKDILSNNFDLAPGAIDKLYHPSMINVYKDVIPNEDGILQLGSPKIDAVKNPMAMRSLHIIRKVVNELLREGIINSDTEVRIEYARELNDANKRHAIADWQKKQYGKHQKYRKEIKELFKAETGFEIEPNETDILKFELWEEQNHICLYTGQEIGISEFVGENPKYDIEHTIPRSLGGDSTKMNMTLCENKFNRENKQKKLPSELANHSEILERIDDWKKKIYILQKKYDSIRTHNGMDKENKDKKIVSMQVRISGSSICVYSQNTLLWLQYGYN

SEQ ID NO: 175 - protein, 1428 aa, Burkholderiales bacterium
MGKTHIIGVGLDLGGTYTGTFITSHPSDEAEHRDHSSAFTVVNSEKLSFSSKSRTAVRHRVRSYKGFDLRRRLLLLVAEYQLLQKKQTLAPEERENLRIALSGYLKRKGYARTEAETDTSVLESLDPSVFSSAPSFTNFFNDSEPLNIQWEAIANSPETTKALNKELSGQKEADFKKYIKTSFPEYSAKEILANYVEGRRAILDASKYIANLQSLGHKHRSKYLSDILQDMKRDSRITRLSEAFGSTDNLWRIIGNISNLQERAVRWYFNDAKFEQGQEQLDAVKLKNVLVRALKYLRSDDKEWSASQKQIIQSLEQSGDVLDVLAGLDPDRTIPPYEDQNNRRPPEDQTLYLNPKALSSEYGEKWKSWANKFAGAYPLLTEDLTEILKNTDRKSRIKIRSDVLPDSDYRLAYILQRAFDRSIALDECSIRRTAEDFENGVVIKNEKLEDVLSGHQLEEFLEFANRYYQETAKAKNGLWFPENALLERADLHPPMKNKILNVIVGQALGVSPAEGTDFIEEIWNSKVKGRSTVHSICNAIENERKTYGPYFSEDYKFVKTALKEGKTEKELSKKFAAVIKVLKMVSEVVPFIGKELRLSDEAQSKFDNPYSLAQLYNLIETERNGFSKVSLAAHLENAWRMTMTDGSAQCCRLPADCVRPFDGFIRKAIDRNSWEVAKRIAEEVKKSVDFTNGTVKIPVAIEANSFNFTASLTDLKYIQLKEQKLKKKLEDIQRNEENQEKRWLSKEERIRADSHGICAYTGRPLDDVGEIDHIIPRSLTLKKSESIYNSEVNLIFVSAQGNQEKKNNIYLLSNLAKNYLAAVFGASDLSQITNEIESTVLQLKAAGRLGYFDLLSEKERACARHALFLNSDSEARRAVIDVLGSRRKASVNGTQAWFVRSIFSKVRQALAAWTQETGNELIFDAISVPAADSSEMRKRFAEYRPEFRKPKVQPVASHSIDAMCIYLAACSDPFKTKRMGSQLAIYEPINFDNLFTGSCQVIQNTPRNFSDKTNIANSPIFKETIYAERFLDIIVSRGEIFIGYPSNMPFEEKPNRISIGGKDPFSILSVLGAYLDKAPSSEKEKLTIYRVVKNKAFELFSKVAGSKFTAEEDKAAKILEALHFVTVKQDVAATVSDLIKSKKELSKDSIENLAKQKGCLKKVEYSSKEFKFKGSLIIPAAVEWGKVLWNVFKENTAEELKDENALRKALEAAWPSSFGTRNLHSKAKRVFSLPVVATQSGAVRIRRKTAFGDFVYQSQDTNNLYSSFPVKNGKLDWSSPIIHPALQNRNLTAYGYRFVDHDRSISMSEFREVYNKDDLMRIELAQGTSSRRYLRVEMPGEKFLAWFGENSISLGSSFKFSVSEVFDNKIYTENAEFTKFLPKPREDNKHNGTIFFELVGPRVIFNYIVGGAASSLKEIFSEAGKERS

SEQ ID NO: 176 - protein, 1025 aa, gamma proteobacterium
MGGYMPQLMRYRLALDIGSTSIGWAMIRLSMQNEPIAIIRMGVRIFSDGRNPKDGSSLAVTRRVARQMRRRRDRLLKRKTRLLNALVQKKFFPEDADARKALVVLNPYELRKEGLYRQLSGPEFGRALFHISQRRGFLSNRKTDKKDNDSSVLKKAIVDLRQQLEVENCQTIGEWLFKQQQSGKSVRARLRGKTQKDKAYDFYIDRAMIAHEFDTLWVSQAKYDPLLFNEDARAILRDILLYQRPLKPVKPGRCTLIPDESRAPLALPLTQQARIYQELNHLRITTPALGAQALTVAQRNTIAALLEKSDVTFVKIAKALGLTSTTEFNLQDIKRDRLKGNATAIILARNQYFGRRWHDFNADLQNLIVDKLVNEGSETALIEWLKANTDVDESAAERVSGVTLPEGYGSLSVAALRRLLPALKEDVVVYSEAVKRAGFDSHSALSLIEQTGELYQELPYYGEVLQRHVGFGSGDPNDSPERRFGKIANPTVHIGLNELRKIINALIKRYGNPAEVVVELARDLKLSREKRKEIQEEQKQRQDRNEKRIKDACEILGIDPLVIDRGKRREISQKMQLWDELNPKDAANRRCPYTGDQISIEKLLSAEVEIEHILPFSKTLDDSLNNKTVAMRRANRDKGNRTPYEAFGESLNPDYDYDAILQRASLMPREKRKRFASDGYQQWLRDDKDFLSRALNDTAYLSRIAKEYLTLICPPNSVRAIPGRMTAQLRAMFGLNRLLSEGGIKNREDHRHHAIDAAVIGVTDQGLLQKFSRASARTRELQLSRLVDDMPLPWDTYREHVTRALEHLVVSHKPDHGYQGKMHEDTAWGLRDNGQVTRRVRSEDGGPRQRLLENKNVVKINSTRDFSRHGIDEQGQVNAYKGYVGGSNYCIEIWIDEKGKWNSDVVSTFQAYQIVRELGEKAAWQKLRNPLLSLSAKPLVMRLIIDDVVKMQIAGQNKIMRVVKIAQNGQIFFAEHNEANVDARDKDKNNPFKYISKTAGSLQKAGGIHMAISPIGDARPVRYGR

SEQ ID NO: 177 - protein, 1364 aa, Pediococcus acidilactici
MGDRKYNLGLDIGTSSIGFAAVDENNQPIRVKGKTAIGVRLFEEGKTAADRRGFRTTRRRLSRRRWRINLLNEIFDAHLAEVDPTFLARLKESNRSNLDPKKSFQGSLLFPERKDYQFYEEYPTIYHLRKALMEKDRKFDFREIYLAVHHIIKYRGNFLNGTPMRSFKVENIELDTLFDQLNQLYAEIVPDNELAFDLAQVADVKDVLSSTTIYKMDKKKQLVKMMLLPASNKALQSENKKIVTQFVNAILNYKFKLDVLLQVETDADWSLKLNDEGADDKLEEFTGDLDENRLEIIDLLQRLHNWFSLNEITKDGNSLSAAMVEKYENHHHHLGLLKKVIENHPDAKKAKALKETYTAYVGKTDDKTQNQDDFYKAVEKNLDDSPDAKEIKRLIQLDQFMPKQRTGQNGAIPHQLHQQELDQIIEKQSKYYPFLAEPNPNVKRRKDAPYKLDELIAFKIPYYVGPLVTPEEQAQNGENVFAWMKRKAAGPITPWNFDEKVDRMESANRFIRRMTTKDTYLFGEDVLPAESMIYQKFVVLNELNNLKINGRHLSLKDKQDVYNDLFKQQKTVSIKALQNYYVTKKKAATAPTVGGLADPKKFLSSLSTYIDFKNMFGERVNDPQFQEDLEQIVEWSTIFEDRGIFKAKLQALGWLSEKQIQQLVAKRYKGWGRLSKKLLTGLKNAEGYSILDEMWRSTGNFMQIQSRPEFAALIQQANEKQFEGNDPDNVWENIENILGDAYTSPQNKKAIRQVVKVVQDIEKAVGNPPEKIAIEFTREAAANPQRTQSRLRTLEKLYESAEEVVDAGLTAELAEFKENKHVLSDKYYLYFTQLGRDVYTGDTISLDKLNDYDVDHILPQSFIKDDSLDNRVLTIRAVNNGKSDNVPAKMFGKKMGSFWRYLLDNGMISKRKYNNLITDPDNISKYAQKGFINRQLVETSQVIKLTANILNGIYDKDTEIIEVPAKMNSQMRKMFDLVKVREVNDYHHAFDAYLTIFIGNYLYKCYPKLQPYFVYDNFKKFGNKEDIGHKRFNFLGKIEREKKVVAPETGEILWSNVAPNETIKQIKKVYDYKFMIVSREITTRRAELFNQTVYPKNYHGKLIPIKEDRPTDLYGGYSGNTDAYLAIVALEDKKKGKYFKVVGIPTRVAAKLEKLKQQDSQQYLQALHKVIAPQFTKSTKKGIKKTEFEIVLDKVHYRQLVQDGPVKMMLGSSTYKYNAKQLVLSEKALQVIADDRKFDETQKDDNLIAVYDEILSIVNQSFDLYDINGFRKKLNDNRDQFIDLPAETKYEGRKVVAHGKREMILEILKGLHANAAFGNLKPIGFSTAFGQLQVPNGIILSKNAILIHQSPSGLFERKIKLSDL

SEQ ID NO: 178 - protein, 1364 aa, Peptoniphilus duerdenii
MKNLKEYYIGLDIGTASVGWAVTDESYNIPKFNGKKMWGVRLFDDAKTAEERRTQRGSRRRLNRRKERINLLQDLFATEISKVDPNFFLRLDNSDLYREDKDEKLKSKYTLFNDKDFKDRDYHKKYPTIHHLIMDLIEDEGKKDIRLLYLACHYLLKNRGHFIFEGQKFDTKNSFDKSINDLKIHLRDEYNIDLEFNNEDLIEIITDTTLNKTNKKKELKNIVGDTKFLKAISAIMIGSSQKLVDLFEDGEFEETTVKSVDFSTTAFDDKYSEYEEALGDTISLLNILKSIYDSSILENLLKDADKSKDGNKYISKAFVKKFNKHGKDLKTLKRIIKKYLPSEYANIFRNKSINDNYVAYTKSNITSNKRTKASKFTKQEDFYKFIKKHLDTIKETKLNSSENEDLKLIDEMLTDIEFKTFIPKLKSSDNGVIPYQLKLMELKKILDNQSKYYDFLNESDEYGTVKDKVESIMEFRIPYYVGPLNPDSKYAWIKRENTKITPWNFKDIVDLDSSREEFIDRLIGRCTYLKEEKVLPKASLIYNEFMVLNELNNLKLNEFLITEEMKKAIFEELFKTKKKVTLKAVSNLLKKEFNLTGDILLSGTDGDFKQGLNSYIDFKNIIGDKVDRDDYRIKIEEIIKLIVLYEDDKTYLKKKIKSAYKNDFTDDEIKKIAALNYKDWGRLSKRFLTGIEGVDKTTGEKGSIIYFMREYNLNLMELMSGHYTFTEEVEKLNPVENRELCYEMVDELYLSPSVKRMLWQSLRVVDEIKRIIGKDPKKIFIEMARAKEAKNSRKESRKNKLLEFYKFGKKAFINEIGEERYNYLLNEINSEEESKFRWDNLYLYYTQLGRCMYSLEPIDLADLKSNNIYDQDHIYPKSKIYDDSLENRVLVKKNLNHEKGNQYPIPEKVLNKNAYGFWKILFDKGLIGQKKYTRLTRRTPFEERELAEFIERQIVETRQATKETANLLKNICQDSEIVYSKAENASRFRQEFDIIKCRTVNDLHHMHDAYLNIVVGNVYNTKFTKNPLNFIKDKDNVRSYNLENMFKYDVVRGSYTAWIADDSEGNVKAATIKKVKRELEGKNYRFTRMSYIGTGGLYDQNLMRKGKGQIPQKENTNKSNIEKYGGYNKASSAYFALIESDGKAGRERTLETIPIMVYNQEKYGNTEAVDKYLKDNLELQDPKILKDKIKINSLIKLDGFLYNIKGKTGDSLSIAGSVQLIVNKEEQKLIKKMDKFLVKKKDNKDIKVTSFDNIKEEELIKLYKTLSDKLNNGIYSNKRNNQAKNISEALDKFKEISIEEKIDVLNQIILLFQSYNNGCNLKSIGLSAKTGVVFIPKKLNYKECKLINQSITGLFENEVDLLNL

SEQ ID NO: 179 - protein, 1089 aa, Corynebacterium matruchotii
MNSANVNYRVGIDVGSYSLGMAAIAIDDDGKPTEILSAISLIHDSGVDPDSAKSAATRLATSGIARRTRRLYRRKRKRLAKLDKFISSQGWPLKEFEKYEDPFYPWRVRAELATTAITDQQELGEKLSIALRHIARHRGWRNPYSKVTALYTVTEPSDAFLAMQEECAKQLGRTIPETITVGQLVTGMNLGKTRLRGENSLLAARPRQSDNANEIHTIAKVQGLSNELVRQIIDHVFAAESPKGSAAEQVGKDPLQPTKKRALKASDAFQQYRIAALIGNLRIRGGKGNRRLTTEETRLVFDYLRSLPAKQEPTWQLVAEQLKIDRGNLVGTAIMTDDGERAGAKPPVHDTNRIMENTKIKPLATWWKSADADARAAMVKALSNAEVDDFDSQAGAQVQEFFFGISDEDQEKLDGLHLPIGRAAYSEDTLDRLTKRMIGEGMDLYEARQAEFKISNDWAPPAPEIGERVGNPAVDRVLKATARWLNAAERQWGAPKSVNIEHVRAAFMSESSARELDRDNQQRAKRNVKVVAEMQEKLGIEGRPSRADVWRFQSIQRQNGKCAYCGAEISFKNSEMDHIIPQAGEGSTNTRDNLVAVCRECNSSKSNIAFAVWAENTSRPGVSVQKAIERTHHWVTDSGLRKPEFDKFRKQVCDRLRRKATDEPIDARSLESVAWMANELRSRIAQKFKDGDTKVRVYKGALTAEARRASGISGKLEFVDGKGKSRLDRRHHAVDAAVVAFTSNYVAETLALRSNMKFDQELRRKAPQWREFTGSDHVHQVEWTKWKYRMQALAELLNNALVQDRIVVMHNLRLRLGNGAAHEDTIGKLTRLKVGDAISTTDIDRASSEALWCALTRDPDYDPKTGLPENPNRTIRIHGTHLTASDEITVFPVAAASIPIRDGFAKLGSNYHHVRLFRVPSGKKYKYCLMQVYTVDLLKFRKEDLFTVELKPQTISVRTCEALLRKALANGTAEYLGWLVSDDELLIDTSSFDTPGIVKLREEYGPVNRWRLAGLTSVTRLNLRPLYLSKEGLKPNVNPEIKKIIDNRSWIITVNKLFSSGHVKIIRRDALGRPRLHSAAHLPICWEVK

SEQ ID NO: 180 - protein, 1134 aa, Streptococcus mitis
MNGLVLGLDIGIASEGVGILEKNSGKIIHANSRLFPAATADNNVERRKNRQARRLNRRKKHRGVRFQDLFEDYGLLTDFSKVSINLNPYRLRVDGLNQQLTNEELFIALKNIVKRRGISYLDDASEDGGAVSSDYGKAVEENRKLLAEQTPGQIQLERFEKYGQVRGDFTVVENGEKLRLINVFSTSAYKKEAERILRKQQEFNNQITDEFIEDYLKILTGKRKYYHGPGNEKSRTDYGRFRTDGTTLDNIFGILIGKCTFYPEEYRASKASYTAQEFNLLNDLNNLTVPTETKKLSEEQKKVIVEYAKEAKTLGASTLLKYIAKMIDASVDQIRGYRVDVNNKPEMHTFEVYRKMQSLETISVGELSRNVLDELAHILTLNTEREGMEEAINTKLKDSFSQDQVLELVQFRKNNSSLFSKGWHNFSLKLMMELIPELYETSEEQMTILTRLGKQKSKETSKRTKYIDEKELTEEIYNPVVAKSVRQAIKIINEATKKHGIFDNIVIEMARENNEEDAKKDYIKRQKANQDEKNAAMEKAAFQYNGKKELPDNIFHGHKELATKIRLWHQQGEKCLYTGKTIPISDLIYNQYKYEIDHILPLSLSFDDSLSNKVLALATANQEKGQRTPFQALDSMDDAWSYREFKSYVKDLKSLSNKKKDYLLTEEDISKIEVKQKFIERNLVDTRYSSRVVLNALQDFYKSHQFDTTISVVRGQFTSQLRRKWGLEKSRETYHHHAVDALIIAASSQLRLWKKQNNPLITYKEGQFVDSQTGEIISLTDDEYKELVFKAPYDHFVDTLSSKTFEDSILFSYQVDSKFNRKISDATIYATRKAKLDKEKKEYTYTLGKIKDIYSLGTKTPSKTGFYKFLDLYNKDKSQFLMFQKDRKTWDEVIEKIMEQYRPFKEYDKTGKLVDFNPFEKYRQENEPIRKYSKKGNGPEIKSLKYYDILLGKHKNITPEGSRNTVALLSLNPWRTDVYYNMETKKYEFLGLKYADLPFEEGGAYGISTETYNELREKEGIGKNSEFKFTLYKNDLILIKDTETNCQQIFRFWSRTGKDNPKSFEKHKIELKPYEKARFEKGEELEVLGKVPPSSNQLQKNMQIENLSIYKVKTDVLGNKHFIKKEGDKPKLKF

SEQ ID NO: 181 - protein, 1373 aa, Streptococcus bovis
MTKKNYSIGLDIGTNSVGWAVITDDYKVPAKKMKVLGNTDKKYIKKNLLGALLFDSGETAEATRLKRTARRRYTRRKNRLRYLQEIFAEEMTKVDESFFQRLDESFLRWDDDNKKLGRYPIFGNKADVVKYHQEFPTIYHLRKHLADSSEKADLRLVYLALAHMIKFRGHFLIEGELNAENTDVQKIFADFVGVYDRTFDDSHLSEITVDAASILTEKISKSRRLENLIKYYPTEKKNTLFGNLIALALGLQPNFKMNFKLSEDAKLQFSKDSYEEDLGELLGKIGDDYADLFTSAKNLYDAILLSGILIVDDNSTKAPLSASMIKRYVEHQEDLEKLKEFIKANKSELYHDIFKDKNKNGYAGYIENGVKQDEFYKYLKNTLSKIAGSDYFLDKIEREDFLRKQRTFDNGSIPHQIHLQEMHAILRRQGDYYPFLKENQDRIEKILTFRIPYYVGPLARKDSRFSWAEYHSDEKITPWNFDKVIDKEKSAEKFITRMTLNDLYLPEEKVLPKHSHVYETYAVYNELTKIKYVNEQGKDSFFDSNMKQEIFDHVFKENRKVTKEKLLNYLNKEFPEYRIKDLIGLDKENKSFNASLGTYHDLKKILDKAFLDDKVNEEVIEDIIKTLTLFEDKDMIHERLQKYSDIFTADQLKKLERRHYTGWGRLSYKLINGIRNKENNKTILDYLIDDGSANRNFMQLINDDTLPFKQIIQKSQVVGDVDDIEAVVHDLPGSPAIKKGILQSVKIVDELVKVMGDNPDNIVIEMARENQTTNRGRSQSQQRLKKLQNSLKELGSNILNEEKPSYIEDKVENSHLQNDQLFLYYIQNGKDMYTGDELDIDHLSDYDIDHIIPQAFIKDDSIDNRVLTSSAKNRGKSDDVPSLDIVRARKAEWVRLYKSGLISKRKFDNLTKAERGGLTEADKAGFIKRQLVETRQITKHVAQILDARFNTESDENDKVIRDVKVITLKSNLVSQFRKDFEFYKVREINDYHHAHDAYLNAVVGTALLKKYPKLASEFVYGEYKKYDIRKFITNSSDKATAKYFFYSNLMNFFKRVIRYSNGKVIVRPVVEYSKDTEDIAWDKKSNFRTICKVLSYPQVNIVKKVETQTGGFSKESILPKGDSDKLIPRKTKKAYWDTKKYGGFDSPTVAYSVFVVADVEKGKAKKLKTVKELVGISIMERSFFEENPVEFLENKGYHNIREDKLIKLPKYSLFEFEGGKRRLLASASELQKGNEMVIPGHLVKLLYHAQRINSFNSTKYLDYVSAHKKEFEKVLSCVEDFANLYVDVEKNLSKIRAVADSMDNFSIEEISNSFINLLTLTALGAPADFNFLGEKIPRKRYTSTKECLNATLIHQSITGLYETRIDLSKIGEE

SEQ ID NO: 182 - protein, 1099 aa, Corynebacterium accolens
MSLLYRVGIDVGTYSLGCTAIEVDDNDQPVSILSSVSLIHDSGLDPDQQKRAVTRLASSGVARRTRRLYRRRRRRMVKLENFLTAQGWETLPFERYSDPYLPWHARVALVNGYISDDTQRGQYLSIAFRHIANHRGWRNPYWKVSSLYSPDKPSDAFEQIRKELEASTGRQIPETATVGQLISFAQFGKDRLRGGGKQKDKKKPQEQVNQAVISARLHQIDHAREINEICRVQKIDDTLRKQILDLVFAAESPKGAQKGRVGKDPLQPKLFRALKASDAFQQYRIAALTGNLRIYRNGVTVPLDRDEKLIVFNYLVNLPKKEEPSWLKIAEILNIDRGQLRGTATMTDDGERAGATPPVHDTNRTILDSKVKPLAHWWENASDDERAAMLKSLSNSEVEDFDSPAGAQVQAFFADLDETEQEKLDSLHLPMGRAAYSEDTLMRLTNRMLDENLDLYEARLAEFGIPKDWAPPAPRIGEPVGNPAVDRVLKGVARWLEAAADEWGAPKSVVIEHVRDGFVSKSKAIEIDRANNNRHKRNRELFQKMQENLGIEGKVRSSDLWRYQSVQRQNCQCAYCGSPITYTTCEMDHIVPRAGEGSTNTRDNLVATCHRCNLAKKNIPFAVWAEKSTIPGVSVKEALDRTRHWSEDSGMSKKDFQKFRKNVCERLNRTVVDEPLDARSMESVAWMANELRGRVAQRFQEENTTVNVYRGALTAEARRAAGITDKLRFIDGTGKSRLDRRHHAVDAAVVAFIHNYVAETLAIRSNKKREAQLLQGTSQWKEFTGSDDKHRAVWNAWIPKMQKLAVLLQIALDEDRIVVTSNLRLRLGNGRAHEDTISELKTIRVGDAISVTDIDRASSEALWCALTREPDFDEKDGLPENPNRRIRVHGTWYDAEDEIEVFPVGAGAIKVRGGYAKLSRFHHARVYKIPGKKAPIYCMLRVYNTDLVQHRHEDLFSVELKPQTMSVRQAEPKLRKALAENTAEYLGWLVTDDELIIDTSTFRTGLIEEMQSEFGLVRRWRLDGFDSPSLLTLRPLHMSAEGLPDDCALGSRKIIDTKGWRVSINKVFNAGNTTVVRRDALGRARLTSNAHLPISWKEE

SEQ ID NO: 183 - protein, 1054 aa, Actinobacillus pleuropneumoniae
MKLTPLNYILGLDLGIASVGWAVVEIDEQENPLGLIDVGVRTFDRAEVAKTGESLALARRLARSSRRLVKRRADRIKKVKRLLKSENILLSADEQLPNDVWQLRVKGLDQKLERQEWAAVLLHLLKHRGYLSQRKNESKSENKELGALRSGVAANHQILQSAEYRTPAEIAVKKFHVEEGHIRNQRGAYTHTFSRLDLLAEIELLFTRQTELGNPHTSAKLLENLTALLMWQKPALAGEAILKMLGKCTFEPTEYKAAKNSYSAERFVWLTKLNNLRILEQGAERALTDNERFALLDQPYEKAKFTYAQARTMLALPDEAIFKGVRYQGEDKKAVETKTILMEMKAYHQIRKALENADLKAEWNELKNNSELLDDIGTAFSLHKTDEDICRYLDGKLSESILNALLENLNFDKFIQLSLKALQQILPLMLQGQRYDEAVSAIYGDHYGKKSAEINRLLPTIPADEIRNPVVLRTLTQARKVINAVVRLYGSPARIHIETGREVGKSYQDRKKLEKQQEDNRKHRESAVQKFKEYFPNFVGEPKGKDILKMRLYELQQAKCLYSGKSLELHRLLEKGYVEVDHALPFSRTWDDSFNNKVLVLANENQNKGNLTPYEWLDGKNNSEPWQNFVARVQTSGFSHTKKQRILSHKLDEKGFIERNLNDTRYVVRFLCNFIADNMLLTGKGKRKVFASNGQITALLRGRWGLQKVRDDNDRHHALDAVVVACSTVAMQQKITRFVRYEEGNVFSGERIDRETGEIIPLHFPSPWAFFRENVEIRIFSENPKLELENRLPDYPQYNHEFVQPLFVSRMPTRKMTGQGHMETVKSAKRLDEGLSVLKVPLTQLKLNDLERMVNREREMALYESLKVRLEQFDNDPAKAFAEPFYKKGGALVKAVRVEQTQKSGVLVRDGNGVADNASMVRVDVFTKAGKYFLVPIYTWQVAKGILPNKAVTANVDEIDWLEMDESYQFIFTMYPNDLVKVKLKKEEFFGYYGGLDRATGAIVIKEHDLEKSKGRQGIYRIGVKLALSFEKYQVDELGKNIRPCRPTKRQHVR

SEQ ID NO: 184 - protein, 1369 aa, Lactobacillus iners
MNNNYYLGLDLGTNSVGWAVTDDHYNIIKFHGKHMWGMRLFEEAETAKDRRLHRQARRRRQRLVERINLLEELFDKEISKVDQGFFARKKESDLHFEDKTTKSEYALFNDKSYTDRDYYKQYPTIFHLIMDLIENDKKRDIRLVYLACHYLIKHRGHFIFDGKNFTVDNSFENLLDKLITYLKDNDDITLSFPKDQLINIFKNSNLNSTEKSDQLKPFFGRTNLEKGIIKLLSGGKQDLSNMFRDETLKNSNYKNLKFSDNRFDDERDGYAADLGDRIDLLILLKQIYDASILESMMSQARVSIDGHKYISSAKVCAYEKHKSDLKRLKSLIKKYLPSEYNNIFRKITEKDNYVAYSKSNITNNKREKALKYVKYVDFTKYLTKKLKTIKTQDAEDDQEIFEIKGELEKQSFLPKQRTLDNSIIPYQLHLMELKKILDNQSKYYDFLLAKDDQEGITVKDKIISLLTFRLPYYIGPVNPAVHGKFAWVKRLANGKVTPWNYKEKIDIDASHEEFIKTKLSKCSFLIGCDVLPKNSLLYQKYMVLSELNTIKFNGVNISEKLKDDIYQNLFKNIQKVTKKRLQNYIKEHENIIGDVIVTGIDNAFKQGLVSYLKFKKIIGDKVDDDRYQKVLEKIIRDITLYDECAGKKIKKEYKDSDLFTEDELNKIVKLTFNDWGRLSAELLDQLEGEDTVSGETGKIIEFMQKHNYNLMQLMSKKFTFKSKIDEINKSYYQHDKFNYKSMIDSLYVSPATKRILWQSLKVVHEISKIMKHDPEKIFIEMARSKEDHPKRKLSRKADLKQVYKDSKKQIISIIGKDKYQDLSNELDNKDDRDLRWDNLYLYYTQLGRSMYSLKPIDISELMNKNLYDQDHIFPKSKKYDDSIENRVLVEKELNVKKSDIYPISDANIIPQKIKGQVESFWKMLYDHKLIGDKKYARLIRSKAFTDDELAGFIARQLVETRQATKETADLLKRLCPKSRIVYAKAQNASIFRQKFDIPKSRTINDLHHAQDAYLNIVVGNIFDTKFTQDPRNFIKNTKDSRNYNLEKIYDYNVERNNYVAWIAPDGETNGTIANVKCNLSTKDFRVTRPSFYKKGALFNQNLSRKGSNLAPIKEHSPKSNPLKYGGYSGKNNSFFVVVAGKDNKGKDIVKLIPVNTLIYNKMLHCDYKAKQELLTSYVANNFAINNFRIVKDDIKMYSLVKIDGAYYYLVGGTDERIEVKNAMQLLLSKDSIKAVKILEKESKDQFANIKNYKDIDIKLGRTFNEVVSKYTNSVFGKSMLISDKYRKDIFKSVEKSILEFNHLDTIGKADNLLKFVTLMRPSGSAHSLKMVGLIERIRKSNVISNFNEFKLINQSVTGLFENEEDLLKL

SEQ ID NO: 185 - protein, 1420 aa, Bifidobacterium bifidum
MSRKNYVDDYAISLDIGNASVGWSAFTPNYRLVRAKGHELIGVRLFDPADTAESRRMARTTRRRYSRRRWRLRLLDALFDQALSEIDPSFLARRKYSWVHPDDENNADCWYGSVLFDSNEQDKRFYEKYPTIYHLRKALMEDDSQHDIREIYLAIHHMVKYRGNFLVEGTLESSNAFKEDELLKLLGRITRYEMSEGEQNSDIEQDDENKLVAPANGQLADALCATRGSRSMRVDNALEALSAVNDLSREQRAIVKAIFAGLEGNKLDLAKIFVSKEFSSENKKILGIYFNKSDYEEKCVQIVDSGLLDDEEREFLDRMQGQYNAIALKQLLGRSTSVSDSKCASYDAHRANWNLIKLQLRTKENEKDINENYGILVGWKIDSGQRKSVRGESAYENMRKKANVFFKKMIETSDLSETDKNRLIHDIEEDKLFPIQRDSDNGVIPHQLHQNELKQIIKKQGKYYPFLLDAFEKDGKQINKIEGLLTFRVPYFVGPLVVPEDLQKSDNSENHWMVRKKKGEITPWNFDEMVDKDASGRKFIERLVGTDSYLLGEPTLPKNSLLYQEYEVLNELNNVRLSVRTGNHWNDKRRMRLGREEKTLLCQRLFMKGQTVTKRTAENLLRKEYGRTYELSGLSDESKFTSSLSTYGKMCRIFGEKYVNEHRDLMEKIVELQTVFEDKETLLHQLRQLEGISEADCALLVNTHYTGWGRLSRKLLTTKAGECKISDDFAPRKHSIIEIMRAEDRNLMEIITDKQLGFSDWIEQENLGAENGSSLMEVVDDLRVSPKVKRGIIQSIRLIDDISKAVGKRPSRIFLELADDIQPSGRTISRKSRLQDLYRNANLGKEFKGIADELNACSDKDLQDDRLFLYYTQLGKDMYTGEELDLDRLSSAYDIDHIIPQAVTQNDSIDNRVLVARAENARKTDSFTYMPQIADRMRNFWQILLDNGLISRVKFERLTRQNEFSEREKERFVQRSLVETRQIMKNVATLMRQRYGNSAAVIGLNAELTKEMHRYLGFSHKNRDINDYHHAQDALCVGIAGQFAANRGFFADGEVSDGAQNSYNQYLRDYLRGYREKLSAEDRKQGRAFGFIVGSMRSQDEQKRVNPRTGEVVWSEEDKDYLRKVMNYRKMLVTQKVGDDFGALYDETRYAATDPKGIKGIPFDGAKQDTSLYGGFSSAKPAYAVLIESKGKTRLVNVTMQEYSLLGDRPSDDELRKVLAKKKSEYAKANILLRHVPKMQLIRYGGGLMVIKSAGELNNAQQLWLPYEEYCYFDDLSQGKGSLEKDDLKKLLDSILGSVQCLYPWHRFTEEELADLHVAFDKLPEDEKKNVITGIVSALHADAKTANLSIVGMTGSWRRMNNKSGYTFSDEDEFIFQSPSGLFEKRVTVGELKRKAKKEVNSKYRTNEKRLPTLSGASQP

SEQ ID NO: 186 - protein, 1092 aa, Ilyobacter polytropus
MKYSIGLDIGIASVGWSVINKDKERIEDMGVRIFQKAENPKDGSSLASSRREKRGSRRRNRRKKHRLDRIKNILCESGLVKKNEIEKIYKNAYLKSPWELRAKSLEAKISNKEIAQILLHIAKRRGFKSFRKTDRNADDTGKLLSGIQENKKIMEEKGYLTIGDMVAKDPKFNTHVRNKAGSYLFSFSRKLLEDEVRKIQAKQKELGNTHFTDDVLEKYIEVFNSQRNFDEGPSKPSPYYSEIGQIAKMIGNCTFESSEKRTAKNTWSGERFVFLQKLNNFRIVGLSGKRPLTEEERDIVEKEVYLKKEVRYEKLRKILYLKEEERFGDLNYSKDEKQDKKTEKTKFISLIGNYTIKKLNLSEKLKSEIEEDKSKLDKIIEILTFNKSDKTIESNLKKLELSREDIEILLSEEFSGTLNLSLKAIKKILPYLEKGLSYNEACEKADYDYKNNGIKFKRGELLPVVDKDLIANPVVLRAISQTRKVVNAIIRKYGTPHTIHVEVARDLAKSYDDRQTIIKENKKRELENEKTKKFISEEFGIKNVKGKLLLKYRLYQEQEGRCAYSRKELSLSEVILDESMTDIDHIIPYSRSMDDSYSNKVLVLSGENRKKSNLLPKEYFDRQGRDWDTFVLNVKAMKIHPRKKSNLLKEKFTREDNKDWKSRALNDTRYISRFVANYLENALEYRDDSPKKRVFMIPGQLTAQLRARWRLNKVRENGDLHHALDAAVVAVTDQKAINNISNISRYKELKNCKDVIPSIEYHADEETGEVYFEEVKDTRFPMPWSGFDLELQKRLESENPREEFYNLLSDKRYLGWFNYEEGFIEKLRPVFVSRMPNRGVKGQAHQETIRSSKKISNQIAVSKKPLNSIKLKDLEKMQGRDTDRKLYEALKNRLEEYDDKPEKAFAEPFYKPTNSGKRGPLVRGIKVEEKQNVGVYVNGGQASNGSMVRIDVFRKNGKFYTVPIYVHQTLLKELPNRAINGKPYKDWDLIDGSFEFLYSFYPNDLIEIEFGKSKSIKNDNKLTKTEIPEVNLSEVLGYYRGMDTSTGAATIDTQDGKIQMRIGIKTVKNIKKYQVDVLGNVYKVKREKRQTF

SEQ ID NO: 187 - protein, 994 aa, Streptococcus downei
MENQRGKRQRITHQEPYSIGLDIGTASVGSAVINNDLTVPQKRFKVRDINGNVIKTIKKNMSSVLIFDEANPAKGARTKRTSRRRYTRRNFRLLELKKLFEKEIEKIDPNFFHRIKEDSFFNWNDKEFDKHPLFGNLKEEKKFHNNYPTVFHLRNEIGKNSSKKFDLRLVYLALAHIIKYRGHFLDETFDPDASVSVEKRLNDFIVEYNELFDKDLRSEAKFSEILMSDSSNSVKIESTLSLYPSEKNTIFQVFLKLIVGNQGDFNKFFKDELESSSHSGKLVFSSDEVEDEKEELISIIGEDYLDIINLCQSLYSTVALAKIISTDTGESNTPLSASMVKRYNEHKGDLANLKGIVKHFIPEKYEEVFGEHSKTGYTAYIRNPNKMPEKKFYDYLYHEGEKGKISGILSDSRIYELPAVQKFILKIEQKSFLKKQRTKENGLIPYQLHLKELKIIIENQSEYYPFLHEIEEKLEKLLTFRIPYFVGPLAQTKYINPRFNWLVRKSEDHIKPWNFSEIVDEEKSATKFIEKLISNDQFLFGEKVLPKRSIIYQQFLIFNELTKVSYQIKDGPSRNFDSETKEEIFNSLFKKNKLGCVTVVDLKNYIKNDQCLSEKEDIQIEGIKKKFNSSYSTYADLSEISGLKELLDDDTQLDLVEEIIRILTVFEDKKMRTKQLEKLNLPANVDIEKLCKKHYKGWANVSRQLIDGIADRSRGFKKTILDYLKDDDIPNNDAFSTKVQKSLNRNFAQLITDKSLDFARKLDESYKIDVKKDYPSLVEDIPGSPAIRRAILQSLYTVDEIIGVMGRMPKNIVIEMARTNEVSDSPKTRKERIKKLIKETENDADALNFGISKVSEIFDEVKKDENLFKELEVYLYFLQEGKDMYGTETREGHRQPKEINFYDVKNSTGKYHIDHIIPQSLYSGNPLDNIVLTESTNNKIKDKDVPDEATVYEMKNFWLYLMKKGAISKKKFSFLTKIEQGGLSNEDKFGFINR

SEQ ID NO: 188 - protein, 1052 aa, Aminomonas paucivorans
MIGEHVRGGCLFDDHWTPNWGAFRLPNTVRTFTKAENPKDGSSLAEPRRQARGLRRRLRRKTQRLEDLRRLLAKEGVLSLSDLETLFRETPAKDPYQLRAEGLDRPLSFPEWVRVLYHITKHRGFQSNRRNPVEDGQERSRQEEEGKLLSGVGENERLLREGGYRTAGEMLARDPKFQDHRRNRAGDYSHTLSRSLLLEEARRLFQSQRTLGNPHASSNLEEAFLHLVAFQNPFASGEDIRNKAGHCSLEPDQIRAPRRSASAETFMLLQKTGNLRLIHRRTGEERPLTDKEREQIHLLAWKQEKVTHKTLRRHLEIPEEWLFTGLPYHRSGDKAEEKLFVHLAGIHEIRKALDKGPDPAVWDTLRSRRDLLDSIADTLTFYKNEDEILPRLESLGLSPENARALAPLSFSGTAHLSLSALGKLLPHLEEGKSYTQARADAGYAAPPPDRHPKLPPLEEADWRNPVVFRALTQTRKVVNALVRRYGPPWCIHLETARELSQPAKVRRRIETEQQANEKKKQQAEREFLDIVGTAPGPGDLLKMRLWREQGGFCPYCEEYLNPTRLAEPGYAEMDHILPYSRSLDNGWHNRVLVHGKDNRDKGNRTPFEAFGGDTARWDRLVAWVQASHLSAPKKRNLLREDFGEEAERELKDRNLTDTRFITKTAATLLRDRLTFHPEAPKDPVMTLNGRLTAFLRKQWGLHKNRKNGDLHHALDAAVLAVASRSFVYRLSSHNAAWGELPRGREAENGFSLPYPAFRSEVLARLCPTREEILLRLDQGGVGYDEAFRNGLRPVFVSRAPSRRLRGKAHMETLRSPKWKDHPEGPRTASRIPLKDLNLEKLERMVGKDRDRKLYEALRERLAAFGGNGKKAFVAPFRKPCRSGEGPLVRSLRIFDSGYSGVELRDGGEVYAVADHESMVRVDVYAKKNRFYLVPVYVADVARGIVKNRAIVAHKSEEEWDLVDGSFDFRFSLFPGDLVEIEKKDGAYLGYYKSCHRGDGRLLLDRHDRMPRESDCGTFYVSTRKDVLSMSKYQVDPLGEIRLVGSEKPPFVL

SEQ ID NO: 189 - protein, 1023 aa, Helicobacter cinaedi
MKIYSFDIGVASIGWAFIENEVLQDCGIRIFTKAENPKNGASLALPRREARGVRKRLARRRGRLNTIKQLLCKEFGLQLEDYLSNDGELPKAYTASKANPLKSPYELRTLALSQKLDSKDLVRVILHIAKHRGYGNKHAKDSKDTESGKVKKAIEFNRKTLAEKGYRSVGEYLYREFFQQSRISQNNGATEFINVRNKAGNYEHCVAQDMLKEELESILNAQRQFGFSLKQDFENKLLTKIFEQRPLKSFADKVGNCCFIAGEKRAPKDSPSAIEFIALSRTINTLINLSKESGEIYNRAIILQIVESTLKKGEISYKELREIIRLDERLRFKDPRLDYSREIKEAEKVKFLEFKQLKGFKKALGESFTTLAISQLDEIAEHIALIKDRVKLNEKLESYALTKEQREALSNLSFSAHINLSLQALKQILPFMRGDNGEQCLDYDESVEKAGLKALSKDTLKGQMLPPLNEFEPYLSNPVVARALAEYRKVLNVLLKQYGSPHKIHIEYAREAKLSSTERQKYEKEQKDNYAANQAAHKKCQELGLEPSSTNLLKLKLWQEQGGLCLYSGAKITISYLQDPTALQVDHIYPYSRSFDDSYMNKCLVLTKANQEKGNRTPFEAFGTDSAKWGVITTLAQKLPHKKRRRILNTAFNDKEAGFKLRNLNDTSYIARLVADYTETYLEFLPLVESENTTLSKGQKGSKKHIAIVNGVLTSTMRYYLGFASKDRDNHLHHALDAVIIGFMNDSVIKAFSDFKKTQETSKAAYYAHTLSKQEYKKQRAFIQLPSGENFRVSVLEKVESVFVSKPPRKRVRGALHEATFYSPNDPKLLKNYGGTKGVERALALGKMRKVGAKIVSNGAMVRVDIFRHKSSGKFYGVPVYTMDFALGILPNKAVVVGKDQNGVIKDWLEMDSSYEFIFSLYKDDVILVQKKEMQRPELCYFVSFDTSGASIKVAKHDNNFSTLTENQKLLFSNATKEEVVGKSIGIQNLKVFEKWQVSVLGEVKRTQSYPRENISLASKAKK

SEQ ID NO: 190 - protein, 874 aa, Listeria seeligeri
LANGQSEFSWLTRKADGEIRPWNIEEKVDFGKSAIDFIEKMTNKDTYLPKENVLPKHSMCYQKYMVYNELTKIRYTDDQGKTHYFSGQEKQQIFNDLFKQKRKVKKKDLELFLYNMNHVESPTVEGVEDAFNSSFTTYHDLQKVGVPQEILDDPLNTEMLEEIIKILTVFEDKRMINERLQEFSNVLDEAVLKKLERRHYTGWGRLSAKLLIGIRDKESHLTILDYLMNDDKHNRNLMQLINDSNLSFKSIIEKEQVSTADKDIQSIVADLAGSPAIKKGILQSLKIVDELVGIMGYPPQTIVVEMARENQTTGKGKNNSKPRFTSLEKAIKELGSQILKEHPTDNQGLKNDRLYLYYLQNGKDMYTGQELDIHNLSNYDIDHVVPQSFITDNSIDNRVLASSAANREKGDNVPSLEVVRKRKVYWEKLYQAKLMSKRKFDYLTKAERGGLTEADKARFIHRQLVETRQITKNVANILHQRFNCKKDESGNVIEQVRIVTLKAALVSQFRKQFQLYKVREVNDYHHAHDAYLNCVVANTLLKVYPQLEPEFVYGDYHQFDWFKANKATAKKQFYTNIMLFFAKKDRIIDENGEILWDKKYLDTIKKVLNYRQMNIVKKTEIQKGEFSNATANPKGNSSKLIPRKADWDPIKYGGFDGSNMAYAIVIEHEKRKKKTVIKKELIQINIMERTAFEKDQKEFLEGKGYRNPKVITKIPKYTLYECENGRRRMLGSANEAQKGNQMVLPNHLMTLLYHAKNCEASDGKSLAYIESHREMFAELLDSISEFASRYTLADANLEKINTIFEQNKSGDVKVIAQSFVNLLEFNAMGAPASFKYFETNIERKRYNNLKELLNATIIYQSITGLYEARKRLDD

SEQ ID NO: 191 - protein, 1082 aa, Neisseria lactamica
MAAFKPNPMNYILGLDIGIASVGWAMVEIDKEENPIRLIDLGVRVFERAEVPKTGDSLAMARRLARSVRRLTRRRAHRLLRARRLLKREGVLQDADFDENGLVKSLPNTPWQLRAAALDRKLTCLEWSAVLLHLIKHRGYLSQRKNEGETADKELGALLKGVADNAHALQTGDFRTPAELALNKFEKESGHIRNQRGDYSHTFSRKDLQAELNLLFEKQKEFSNPHVSDSLKEGIETLLMAQRPALSGDAVQKMLGHCTFEPAEPKAAKNTYTAERFIWLTKLNNLRILEQGSERPLTDTERATLMDEPYRKSKLTYAQARKLLGLEDTAFFKGLRYGKDNAEAPTLMEMKAYHAISRALEKEGLKDKKSPLNLSTELQDEIGTAFSLFKTDKDITGRLKDRVQPEILEALLKHISFDKFVQISLKALRRIVPLMEQGKRYDEACAEIYGDHYCKKNAEEKIYLPPIPADEIRNPVVLRALSQARKVINCVVRRYGSPARIHIETAREVGKSFKDRKEIEKRQEENRKDREKAAAKFREYFPNFVGEPKSKDILKLRLYEQQHGKCLYSGKEINLVRLNEKGYVEIDHALPFSRTWDDSFNNKVLVLGSENQNKGNQTPYEYFNGKDNSREWQEFKARVETSRFPRSKKQRILLQKFDEEGFKERNLNDTRYVNRFLCQFVADHILLTGKGKRRVFASNGQITNLLRGFWGLRKVRAENDRHHALDAVVVACSTVAMQQKITRFVRYKEMNAFDGKTIDKETGEVLHQKAHFPQPWEFFAQEVMIRVFGKPDGKPEFEEADTPEKLRTLLAEKLSSRPEAVHEYVTPLFVSRAPNRKMSGQGHMETVKSAKRLDEGISVLRVPLTQLKLKGLEKMVNREREPKLYDALKAQLETHKDNPAKAFAEPFYKYDKAGNRTQQVKAVRIEQVQKTGVWVRNHNGIADNATMVRVDVFEKGGKYYLVPIYSWQVAKGILPDRAVVAFKDEEDWTVMDDSFEFRFVLYANDLIKLTAKKNEFLGYFVSLNRATGAIDIRTHDTDSTKGKNGIFQSVGVKTALSFQKNQIDELGKEIRPCRLKKRPPVR

SEQ ID NO: 192 - protein, 1326 aa, Streptococcus pseudoporcinus
MLGTVLFDSGETAQARRLKRTNRRRYTRRRYRLCQLQNIFATEMVKVDDTFFQRLSESFFYYQDKAFDKHPIFGNSKEERAYHKTYPTIYHLRKDLADRDQKADLRLIYLALSHIIKFRGHFLIEGKLNSENTDVQKLFIALVTVYNLLFEEEPIAGETCDAKALLTAKTSKSKRLESLISEFPGQKKNGLFGNLLALALGLRPNFKSNFGLSEDAKLQITKDTYEEELDNLLAEIGDHYADLFLAAKNLSDAILLSDILTLSDENTRAPLSASMIKRYEEHQEDLALLKKLVKEQMPEKYWEIFSNAKKNGYAGYIEGKVSQEDFYRYIKPILSRLKGGDEFLAKIDRDDFLRKQRTFDNGSIPHQIHLKELHAILRRQEKYYPFLAEQKEKIEQLLCFRIPYYVGPLAKGGNSSFAWLKRRSDEPITPWNFKDVVDEEASAQAFIEGMTNYDTYLPEEKVLPKHSPLYEMFTVYNELTKVKYIAENMTKPLYLSAEQKEAIIDHLFKQTRKVTVKDLKEKYFSQIEGLENVDVTGVEGAFNASLGTYNDLLKIIKDKAFLDDEANAEILEEIVLILTLFQDEKLIEKRLAKYANLFEKSVLKKLRKRHYRGWGRLSRQLIDGMKDKASGKTILDFLKADDFANRNFIQLINDSSLDFEKLIDDAQKKAIKRESLTEAVANLAGSPAIKKGILQSLKVVDEIVKVMGHNPDNIVIEMSRENQTTAQGLKNARQRLKKIKEVHKKTGSRILEDNSERITNLTLQDNRLYLYLLQDGKDMYTGQDLDINNLSQYDIDHIIPQSFIKDNSIDNLVLTTQKANRGKSDNVPSIEVVRDMKDRVWRRQLANGAISRQKFDHLTKAERGGLADSDKARFLRRQLVETRQITKHVAQLLDSRFNSKSNQNKKLARNVKIITLKSKIVSDFRKDFGLYKLREVNNYHHAHDAYLNAVVGTALLKKYPKLEAEFVYGDYKHFDLVKLISKSDPSLGKATAKVFFYSNIMNFFKEELSLADGTLMKRPVIETNTETGEVVWDKVKDFKTIRKVLSYPQVNIVKKTEIQSGAFSKESVLSKGNSDKLIERKKGWDPKKYGGFDSPNTAYSIFVVAKVAKRKAQKLKTVKEIVGITIMEQAEYEKDNIAFLEKKGYQDIQEKLLIKLPKYSLFELENGRRRLLASANEFQKGNELALSGKYMKFLYLASRYDKLSSKIESEQQKKLFVEQHLHYFDEILDIVVKHATCYIKAENNLKKIISLYKKKEAYSINEQALNMLNLFIFTSLGAPSTFVFFDETIDRKRYTTSSDVLNGILIQQSITGLYETRIDLSRFGGD

SEQ ID NO: 193 - protein, 1150 aa, Enterococcus faecalis
MYSIGLDLGISSVGWSVIDERTGNVIDLGVRLFSAKNSEKNLERRTNRGGRRLIRRKTNRLKDAKKILAAVGFYEDKSLKNSCPYQLRVKGLTEPLSRGEIYKVTLHILKKRGISYLDEVDTEAAKESQDYKEQVRKNAQLLTKYTPGQIQLQRLKENNRVKTGINAQGNYQLNVFKVSAYANELATILKTQQAFYPNELTDDWIALFVQPGIAEEAGLIYRKRPYYHGPGNEANNSPYGRWSDFQKTGEPATNIFDKLIGKDFQGELRASGLSLSAQQYNLLNDLTNLKIDGEVPLSSEQKEYILTELMTKEFTRFGVNDVVKLLGVKKERLSGWRLDKKGKPEIHTLKGYRNWRKIFAEAGIDLATLPTETIDCLAKVLTLNTEREGIENTLAFELPELSESVKLLVLDRYKELSQSISTQSWHRFSLKTLHLLIPELMNATSEQNTLLEQFQLKSDVRKRYSEYKKLPTKDVLAEIYNPTVNKTVSQAFKVIDALLVKYGKEQIRYITIEMPRDDNEEDEKKRIKELHAKNSQRKNDSQSYFMQKSGWSQEKFQTTIQKNRRFLAKLLYYYEQDGICAYTGLPISPELLVSDSTEIDHIIPISISLDDSINNKVLVLSKANQVKGQQTPYDAWMDGSFKKINGKFSNWDDYQKWVESRHFSHKKENNLLETRNIFDSEQVEKFLARNLNDTRYASRLVLNTLQSFFTNQETKVRVVNGSFTHTLRKKWGADLDKTRETHHHHAVDATLCAVTSFVKVSRYHYAVKEETGEKVMREIDFETGEIVNEMSYWEFKKSKKYERKTYQVKWPNFREQLKPVNLHPRIKFSHQVDRKANRKLSDATIYSVREKTEVKTLKSGKQKITTDEYTIGKIKDIYTLDGWEAFKKKQDKLLMKDLDEKTYERLLSIAETTPDFQEVEEKNGKVKRVKRSPFAVYCEENDIPAIQKYAKKNNGPLIRSLKYYDGKLNKHINITKDSQGRPVEKTKNGRKVTLQSLKPYRYDIYQDLETKAYYTVQLYYSDLRFVEGKYGITEKEYMKKVAEQTKGQVVRFCFSLQKNDGLEIEWKDSQRYDVRFYNFQSANSINFKGLEQEMMPAENQFKQKPYNNGAINLNIAKYGKEGKKLRKFNTDILGKKHYLFYEKEPKNIIK

SEQ ID NO: 194 - protein, 1150 aa, Enterococcus faecalis
MYSIGLDLGVSSVGWSVIDERTGNVIDLGVRLFSAKNSEKNLERRTNRGGRRLIRRKTNRLKDAKKILAAVGFYEDKSLKNSCPYQLRVKGLTEPLSKGEIYKVTLHILKKRGISYLDEDDTEAAKESQDYKEQVRENAQLLTKYTPGQIQLQRLKENNRVKTGINAQGNYQLNVFKVSAYANELATILKTQQAFYPNELTDDWIALFVQPGIAEEAGLIYRKRPYYHGPGNEANNSPYGRWSDFKKTGQPATNIFDKLIGKDFQGELRASGLSLSAQQYNLLNDLTNLKIDGEIPLSPEQKEYILAELMTKEFTRFGINDVAKLLGVKKERLSGWRLDKKGKPEIHTLKGYRNWRKIFAESGIDLATLPTETIDCLAKVLTLNTEREGIENTLAFELPELAESVKLLVLDRYKELSQSVSTQAWHRFSLKTLHLLIPELMNATSEQNTLLEQFQLKSDVRKRYSEYKKLPTKDVLTEIYNPTVNKTVSQAFKVIDALLVKYGKEQIRYITIEMPRDDNEEDEKKRIKELHAKNSQRKNDSQSYFMQKSGWSQEKFQTTIQKNRRFLAKLLYYYEQDGICAYTGLSISPELLVSDSTEIDHIIPISISLDDSINNKVLVLSKANQVKGQQTPYDAWMDGSFKKINGKFSNWDDYQKWVESRHFSHKKENNLLETRNIFDSEQVEKFLARNLNDTRYASRLVLNTLQSFFANQETKVRVVNGSFTHTLRKKWGADLDKTRETHHHHAVDATLCAVTPFVKVSRYHYAVKEETGEKVMREIDFETGEIVDEMSYREFKKSKKYERKTYQVKWPNFREQLKPVNLHPRIKFSHQVDRKANRKLSDATIYSVREKTEVKTLKSGKQKITTDEYTIGKIKDIYTVDGWEAFKKKQDKLLMKDLDEKTYERLLSIAETTPDFQEVEEKNGKVKRVKRSPFAVYCEENDIPAIRKYAKNNNGPLIRSLKYYDGKLNKHINITKDSQGRPVEKTKNGRKVTLQSLKPYRYDIYQDLETKAYYTVQLYYSDLRFVEGKYGITEKEYMKKVAEQTKGQVVRFCFSLQKNDGLEIEWKDSQCYDVRFYNFQSANSINFKGLEQEMMPAENQFKQKPYNNGAINLNIAKYGKEGKKLRKFNTDILGKKHYLYYEKEPKNIIK

SEQ ID NO: 195 - protein, 1345 aa, Streptococcus anginosus
MDQKYSIGLDIGTNSVGWAVVTDDYKVPAKKMKVLGNTDKQSIKKNLLGALLFDSGETAEATRLKRTARRRYTRRRNRLRYLQEIFAEEMNKVDENFFQRLDDSFLVDEDKRGERHPIFGNIAAEVKYHDDFPTIYHLRKHLADISQKADLRLVYLALAHMIKFRGHFLIEGQLKAENTNVQALFKDFVEVYDKTVEESHLSEMTVDALSILTEKVSKSRRLENLIAHYPAEKKNTLFGNLIALSLGLQPNFKTNFQLSEDAKLQFSKDTYEEDLEGLLGEIGDEYADLFASAKNLYDAILLSGILTVDDNSTKAPLSASMVKRYEEHQKDLKKLKDFIKVNAPDQYNAIFKDKNKKGYAGYIENGVKQDEFYKYLKGILLQINGSGDFLDKIDREDFLRKQRTFDNGSIPHQIHLQEMHAILRRQEEHYPFLKENQDKIEKILTFRIPYYVGPLARKGSRFAWAEYKADEKITPWNFDDILDKEKSAEKFITRMTLNDLYLPEEKVLPKHSLLYETFTVYNELTKVKYVNEQGEAKFFDANMKQEIFDHVFKENRKVTKDKLLNYLNKEFEEFRIVNLTGLDKENKAFNSSLGTYHDLRKILDKSFLDDKANEKTIEDIIQTLTLFEDREMIRQRLQKYSDIFTKAQLKKLERRHYTGWGRLSYKLINGIRNKENKKTILDYLIDDGYANRNFMQLINDDALSFKEEIARAQIIGDVDDIANVVHDLPGSPAIKKGILQSVKIVDELVKVMGHNPANIIIEMARENQMTDKGRRNSQQRLKLLQDSLKNLDNPVNIKNVENQQLQNDRLFLYYIQNGKDMYTGETLDINNLSQYDIDHIIPQAFIKDNSLDNRVLTRSDKNRGKSDDVPSIEVVHEMKSFWSKLLSVKLITQRKFDNLTKAERGGLTEEDKAGFIKRQLVETRQITKHVAQILDERFNTEFDGNKRRIRNVKIITLKSNLVSNFRKEFELYKVREINDYHHAHDAYLNAVVGNALLLKYPQLEPEFVYGEYPKYNSYRSRKSATEKFLFYSNILRFFKKEDIQTNEDGEIAWNKEKHIKILRKVLSYPQVNIVKKTEEQTGGFSKESILPKGESDKLIPRKTKNSYWNPKKYGGFDSPVVAYSILVFADVEKGKSKKLRKVQDMVGITIMEKKRFEKHPVDFLEQRGYRNVRLEKIIKLPKYSLFELENKRRRLLASARELQKGNELVIPQRFTTLLYHSYQIEKNYEPEHREYVEKHKDEFKELLEYISVFSRKYVLADNNLTKIEMLFSKNKDAEVSSLAKSFISLLTFTAFGAPAAFNFFGENIDRKRYTSVTECLNATLIHQSITGLYETRIDLSKLGED

SEQ ID NO: 196 - protein, 849 aa, Listeria ivanovii
  misc_feature (780)..(780): Xaa can be any naturally occurring amino acid
LIDKNGTPQHITMIDKMRGKCTYFPEEVRIAKMSYTAELFGLLNDFNNIYFADPETGEKIGFTEADKKYFIDTFIHDQKGVKNITLKQIMKHKNIINETDIFGYRINTKNGTPIFTEFKGLKALKKALKEVDLPDEFYQNTEMMDEIANILSSEKSFTRREEQLKELFLAAFNDELEEAVKELINDITFKEFHSLSKKAIMVILPELWSTNQNQMQLFVQHKMDKSRLENLQNGTKIQFDDEAILSTIAKRAHRETIKIVDAVRAKYGELDYVIVEMAREKNSDEQKKVYNRAQKKQGDFEKEMCKLLGVSELKELRLNGKQHLALKFWKEQDGKCIYSGKPIALSDIVNNFNGLLEIDHIIPISISYDDSQQNKVLCLRSENQRKGQLSPYQYLIRGMGERSFDAFKAEVLSRHFGKKKQNYLLEMEDIANNDELRKHFINRNLVDTRYAMRTFSNTLKTFYTVNGIPTKVMPVNGAMTSALRKRAKLNKDRDAGHAHHAIDALIVAAIGRLPLIKQLAELRVNEEGEFADKITDKGLDDKTAFDDKTLKFLRNLLNYESKVKYSHKVDRKPNRSLSKQTLYSTREKDGEKYIIGKVKNIYTLDKAGYAALKKRIDKNPEDFLMAQHNPKTWEEIIKIMEVYSKADNPFKEFYDEHGFIMKDGKVPVKSLRYHDKKLGIHVPLTHKYENTRHDVVLLKRNSLRVDIYMNKEGVYKYQGVPYNWFNQKGDKYILDMEKYHNEIDGTRASFKNIDNTFEFQFSLYKNDVFSYMKKDKEGEXVSYTKLFRSDSSPRENRLEVENIDMRTSSQQMPTINPLKNLIKYNTDILGNTYPIQKEKFVTVFTLHSK

SEQ ID NO: 197 - protein, 1457 aa, Prevotella buccae
MKTILGLDLGTNSIGWAKVSVDDYGNYLHDIKLGSRIIPMSQDVLGNFDSGVTVSQTAQRTEFRSKRRLVQRNLQRRERLHRVLHVLDFLPAHYDAAIGWDRTEAVTYGKFLNHAEPKLAWEELGNGKRRFLFMDSFHEMVADFARCQPALVADGKKIPLDWTIYYLRKKALTQAITKEELAWILLNFNQKRGYYQLRGEEEEENPTKQEEYYELKVVSVEATDSRKGNDTWYNVHLENGWIYRRSSKISLDDWVGKVKQFIVTTEYEKDGATLKTDKEGYVKRSFRAPNENDWGLRKKRTETLLEMSGKTVGAFIYDHLLQEPADKIRGNFIRTIERHYYKAELEAILAEQCKYHIELRDKEMLEACARELYLNNLPHQRSLMKKDMTYLLLYDLIFYQRPLKSKKALIANCPYEYYEYVDKETGEIKRQNIKCIAKSNPYFQEFRLWQFVLNLRLFDRVEDKEVTANYLPTADDHARLFTYLNDRKEINQETLLKDYFKLKKVKIGNEKEYPIRWNYIEDKEKKYPCNETRYELLMALDRAGIEHKWLDDNNLEYRLWHLLYSVEVKSESETALRKLKNDDAFVNSFLKVKPFKKEYGAYSEKAIKRLLAVMRKGFLWNEQDICDETRKRIEIIIKGDVDEKVKERMGHAAYSFDRVSDFQGLPEWLACYVVYGRHSEAMDIQHWDSPERLMAYINNFKQYSLRNPIVEQCILETLRTVHDIWKETGQIDEIHVELGREMKSTSEERARRTQNVLRNENTNLRIKSLLIELKNDTDICNVHPYSPMQQEILRIYEEGALQELNREDEDFEEISKISQMSQPSGKELNRYKLWLEQKYRSPYTGKAISLAKLFTPAYQIEHVIPQSRYFDDSFTNKVICEAEVNTLKSNLLGYEFIKKHGGEIIHCTTLGDVRIFSESEYKAFVMDHYANNKSKKDKLLMEDIPQEFLSRQMNDSRYISKVVKTLLSNIVRMADESEATSKSVIVCTGGVTDRLKKDWGLNDVWNSIVYSRFERLNRLTGTEAFGHWENKDGKRVFQTSMPLELQRGFRKKRIDHRHHAMDALVIACASRNIVNYLNNESANNPKKREDLRRQLCDKNRVIRKPWETFTQDAYNALENVVVSFKNYVRVINKATNRYEHYDENGKKRFVQQKGSELWAIRKPMHKETYYGHVNLRRKELVTLQKALDDIPSICDKKLRDYISALVEKHFNKRQLLAHFKSTDYYWQKQYVNKVYVWTFSDDIKPLVATRKLLDTSFDAKRIGTITDTGIQKILRNYLEAKGGNATLAFTPEGIAEMNQNISKYNDGKPHQPILKVRITEPMGAKYRVGQTGNKMAKYVEAQSGTNLYFAIYEDSEGKRSYTTVPLDEVAERLKQRLSPVPEKDENDVPLKFYLSPNDLVYVPTEEELQLRECKLNKDRIYKMVSSTGNECHFIPYYVANVIYNKGGFNMQMHRPQS

SEQ ID NO: 198 - protein, 1330 aa, Enterococcus italicus
MKNDYTIGLDIGTNSVGYSVVTDDYKVISKKMNVFGNTEKKSIKKNFWGVRLFESGQTAQEARMKRTSRRRIARRKNRICYLQEIFQPEMNHLDNNFFYRLNESFLVADDAKYDKHPIFGTLDEEIHFHEQFPTIYHLRKYLADGDEKADLRLVYLAIAHIIKFRGNFLIEGELNTENNSVIELSKVFVQLYNQTLSELEGFQFIDESIDFSEVLTQQLSKSERADNVLKLFPDEKGTGIFAQFIKLIVGNQGNFKKVFQLEEDQKLQLSTDDYEENIENLLAIIGDEYGDIFVAAQNLYQAILLAGILTSTEKTRAKLSASMIQRYEEHAKDLKLLKRFVKEHIPDKYAEIFNDATKNGYAGYIDGKTKEEEFYKYLKTTLVQKSGYQYFIEKIEQENFLRKQRIYDNGVIPHQVHAEELRAILRKQEKYYSFLKENHEKIEQIFKVRIPYYVGPLAKHNEQSRFAWNIRKSDEPIRPWNMNDVVDENASAVAFIERMTIKDIYLNENVLPRHSLIYEKFTVFNELTKVLYADDRGVFQRFSAEEKEDIFEKLFKSERKVTKKKLENYLRIELSISSPSVKGIEEQFNANFGTYLDLKKFDELHPYLDDEKYQDTLEEVIKVLTVFEDRSMIQNQLEQLPLNLSTKTIKALSRRKYTGWGRLSARLIDGIHDKNSGKTILDYLIEDESDSYIVNRNFMQLINDDHLSFKKIIEDSQPYKEQQSAEEIVSELSGSPAIKKGILQSLKIVDELVAIMGYKPKNIVVEMARENQTTGRGKQNSKPRLKGIENGLKEFSDSVLKGSSIDNKQLQNDRLYLYYLQNGKDMYTGHELDIDHLSTYDIDHIIPQSFLTDNSIDNRVLTTSKSNRGKSDNVPSEEVVRKMDRFWRKLLNAKLISERKYTNLTKKELTESDKAGFLKRQLVETRQITKHVATILDSKFNEDSNNRDVQIITLKSALVSEFRKTFNLYKVREINDLHHAHDAYLNAVVALSLLRVYPQLKPEFVYGEYGKNSIHDQNKATIKKQFYSNITRYFASKDYIINDDGEILWNKQETIAQVIKTLGMHQVNVVKKVEIQKGGFSKESIQPKGESQKLIRRKQQWNTKKYGGFDSPVVAYAILLSFDKGKRKARSFKIVGITIQDRESFEGNPILYLSKKDYHNPKVEAILPKYSLFEFENGRRRMVASASETQKGNQLIIPGHLMELLYHSKKIINGKNSDSVSYIQNNKEKFREIFEYIVDFSSKYISADANLNKIEKIFENNFHKASEQEIAKSFINLLTFTAMGAPADFEFFGEKIPRKRYVSISEIIDAVFIHQSITGLYETRVRLTEV

SEQ ID NO: 199 - protein, 1123 aa, Mobiluncus curtisii
MFVYLNSPRGFGPATFLTDLPHFCIIFGNNDFMDNRKYHVGIDVGTNSVGFAAVEVGDSGSPIRFLNTMVVIHDSGVDPEQKKYAITRLASAGTARRTRRLYRTRRQRLRELDDFISNELGYPLVNLENFADPYEPWKVRADLATIKLPADELPEAMSIALRHMARHRGWRSPYQRVEALHLHAEISEEFSALKKRVMEKTGDVFSDDATPAEVLVDLMGRQKIRGADGMLSGKLRQSDNANELRKIASVQGIDDETLNRIIDRVFFSRSPKGKASERVGMDALPGQGSKPRALKAMPSFQKFRIVSVICNLRIKDSGDDNRPLSMEEKEQLIGYLMSSTTDDHVTWTDVAELLHVKRSNLQGTAKEGPDGERPYTRPPVNSAWSKIKDSKIKSLVALWKTGDVDVQSAIVEALSNASVLEDARPGADIVVAYLESLDDKELESLDKVGLPAGRASYSEDSLERLTERMLQDDCDLFEARKREFGVSDDWKPPADPIYAPVGNPGVDRVLKIVNRLLMAAEREWGAPTQINIEHVRSGFSSELMQREFERENERRRAQNEEAVKAILTEKGGNSHVSKYDIIRYYAVKRQNCQCLYCGTPITFSDCELDHIVPRKGVGSTNSRVNLAAACRSCNRDKSNLPFAVWAGKTSNFDVSIDGAVSRVKQWQRSQNEGAREFRAFQNEVISRLLKTTEDPEIDSRSLESVAWMARELHHRVEYYFQSKGAQTQVSVYRGAVTAQARKSSGLEDKVKMIGGGGKTRLDRRHHAMDAATIALMTPGISTTLSEKNNLRDAQKFTGQSETWKDYCGRTETAREHFAVWKSNMERLTDLFNDKLENDAIPVVQPLRLRLSDSKAHDDGIGKLDSKKLGSVWSLADIDRAATPQIWTALTRCDDFDPTKGLPENANRVIRAQGVKYESEDNIPVFPSNVAAIAVRDGYAEIGSTIHHARIYRIDDGKKIFYSMIRVFAVDLLKHQAEDLFTVKLPPSAISIRTCEDSLRRALSNGTAEYLGWLVPGDEIIVDTSDKAFHTGQIGDLLRNFPVNSFRLTGFPSNSRLRLKPVLLAGEGLRDDAEDSIKKILSGQGWRPAINVLFSKGKPRIVRRNSLGIERPSSNNGLPFSWEA

SEQ ID NO: 200 - protein, 1054 aa, Staphylococcus lugdunensis
MNQKFILGLDIGITSVGYGLIDYETKNIIDAGVRLFPEANVENNEGRRSKRGSRRLKRRRIHRLERVKKLLEDYNLLDQSQIPQSTNPYAIRVKGLSEALSKDELVIALLHIAKRRGIHKIDVIDSNDDVGNELSTKEQLNKNSKLLKDKFVCQIQLERMNEGQVRGEKNRFKTADIIKEIIQLLNVQKNFHQLDENFINKYIELVEMRREYFEGPGKGSPYGWEGDPKAWYETLMGHCTYFPDELRSVKYAYSADLFNALNDLNNLVIQRDGLSKLEYHEKYHIIENVFKQKKKPTLKQIANEINVNPEDIKGYRITKSGKPQFTEFKLYHDLKSVLFDQSILENEDVLDQIAEILTIYQDKDSIKSKLTELDILLNEEDKENIAQLTGYTGTHRLSLKCIRLVLEEQWYSSRNQMEIFTHLNIKPKKINLTAANKIPKAMIDEFILSPVVKRTFGQAINLINKIIEKYGVPEDIIIELARENNSKDKQKFINEMQKKNENTRKRINEIIGKYGNQNAKRLVEKIRLHDEQEGKCLYSLESIPLEDLLNNPNHYEVDHIIPRSVSFDNSYHNKVLVKQSENSKKSNLTPYQYFNSGKSKLSYNQFKQHILNLSKSQDRISKKKKEYLLEERDINKFEVQKEFINRNLVDTRYATRELTNYLKAYFSANNMNVKVKTINGSFTDYLRKVWKFKKERNHGYKHHAEDALIIANADFLFKENKKLKAVNSVLEKPEIESKQLDIQVDSEDNYSEMFIIPKQVQDIKDFRNFKYSHRVDKKPNRQLINDTLYSTRKKDNSTYIVQTIKDIYAKDNTTLKKQFDKSPEKFLMYQHDPRTFEKLEVIMKQYANEKNPLAKYHEETGEYLTKYSKKNNGPIVKSLKYIGNKLGSHLDVTHQFKSSTKKLVKLSIKPYRFDVYLTDKGYKFITISYLDVLKKDNYYYIPEQKYDKLKLGKAIDKNAKFIASFYKNDLIKLDGEIYKIIGVNSDTRNMIELDLPDIRYKEYCELNNIKGEPRIKKTIGKKVNSIEKLTTDVLGNVFTNTQYTKPQLLFKRGN

SEQ ID NO: 201 - protein, 586 aa, Pseudoramibacter alactolyticus
MTYYLGLDMGTGSVGWAATDKNYKLIRAKGKDLWGVRLFQTAKTAAERRSHRVARLRRQREKVRIGYLKTIFSDAINKVDPGFFQRLDDSFFYAEDKNINQPYALFADTGYTDVDYYRDYPTIFHLRSTLIHDTSPKDVRLVYLAVLNMFKHRGHFLASNLSENGVDDFGDIYQQWCKSVPKPVQISDPEAKTEKIENILSKAGISNTRRLEALLEVFGIKRRDAFAEVLKLWCGLKGNLSKIWSETDFSDLDNTKPALSFKDSNLDMVLSQLEEILPDEDYSWLMLTKQIYDWSLLSGMMKDASGKSYDYLSDARVASYQKHSEDLKTLKRFYHDNHLSAAYDQMFRVMGKDNYSAYAGSVQSKKEVVRRGASCGIEELYKRIKKDLKPVPDCETKQIILENIERGTFLPKQLTRDNGVIPNQIHVHELKAILKNAENYLPFLKEGSELTNSEKILQLFQFQIPYYVGPLYSDENNYAWVVRKEGGRVFPWNFAEKVDEKASAEGFISELVARCTYLDNEKVLPKASLLYEKFMVLNELNNLRINGERISVDIKQELYQNLFTRGKKVTLKKSEGLFGGQRIFCL

SEQ ID NO: 202 - protein, 1385 aa, Gemella morbillorum
MKNKTWYLGLGVGPTSIGWAATDSNYKLLRKNKKRLWGVRLFEEAKTAVDRRTFRAERRRLARRKWRISLLEELFAKEVSKNDPNFFLRLKESKYHFEDKSLMNEYILFNDKDYTDKDYYKEYPTIYHLRLSLTTEENPDIRKVYLAVHSMLKNRGHFLLQGQSFNDSNIDSVIKELLELETVKINFEVTDEVIHSLKKIALEKKNLSDKNNDVKKLYPKEKQLQEIFKLVFGGKTSLDKLYDIEEYKELDNSVKSISFKEKVYEEVRPDYEQILSNYIELLDLAKLVYDSIVLADIKKEGKTISESKVELYNKHKDDLANLKKLVKIDSKLSEDKKKEVYFTIFKEDKEKGTNYVNYTHRSQEGKSCSYEDFKKFLKKELEKLEDSPTKTTILEELDLETFLPLQRTKDNSVVPYQIHKEELVKILDNAAKYHSFLAEKDDSGYSTREKVVQLFEFRIPYYIGPLNAHHNTENGGYSWAIRKKGMESVPVTPWNFKDVIDESASAEAFVNNLKNKCAYLSGEDVLPKNSLLYSEYALLNELNALRYEGNRISVEARDVIVTKLFKEQGKKVTKKTIKELLKTEGFIDGKGEIVGIDNIVKNDLKSYRDFKKILADKFDKERVENIILWITLYGESRKLIKEKITKVYGDFYTVDEIEKMSRLTYKDWGILSRKLLTELVSEKLYNEETGECLNIIGAMRQGTILFMELLADKFDYMSQIKNHNKENKDDITEITPDILENLHASPAVKRSIWQTVRIVEELKTIIGCVPTKIFIETTKRNNAPYKVPTLNRNDLVTKYKTIREHEIFELEKELKNTLDFTLNKNRLINEEPSKLKATKLYLYYTQLGRCMYTGKKIDLGELFDNNNKYDIDHIYPQSKVKDGSFNNIVLVTKASNDMKADVFPLKSKFQTKENKIFWRFLKEKKLITEEKYNRLVRTEEFSNGELTGFITRQLVETSQAIKVISNVLRELNPETTICYSKAENVSSFRQSFGKIKEANRKAENNEKLIRVQEINDYYNAKDAYLSIVVGNVYDVKFTRNVHNFIKNNKDARRYSLNGLFYTDVKNANTIAWEMDKTVHVVEKTMNNNNILITRRTSEQKGALYDATLYKAKVAEKAKEGTYYPLKTTDSKIKDVGKYGGFTKIKIAYYSIFEYTLDGKKGKQKITRIVPIPIYISQNIKDDKALLEYAQTRLPGKDLKIKYRKLCIGSLVKINNFNYYIGGKTNNNFTFDSAVQVILDKDSESYIKELAKYLNWKKENKDGKLWESITEDKNIQLYDSLVKKMNTGIFIRKTPNKYTELLTLEVKNKFINIDIDEQVKLLLEILNLLTNKKFTSKLNEIGITASRGVCSFNLSNQSQFSIIEQSVTGVYEKEKLIIEKKKEGIL

SEQ ID NO: 203 - protein, 1029 aa, Alicycliphilus denitrificans
MRSLRYRLALDLGSTSLGWALFRLDACNRPTAVIKAGVRIFSDGRNPKDGSSLAVTRRAARAMRRRRDRLLKRKTRMQAKLVEHGFFPADAGKRKALEQLNPYALRAKGLQEALLPGEFARALFHINQRRGFKSNRKTDKKDNDSGVLKKAIGQLRQQMAEQGSRTVGEYLWTRLQQGQGVRARYREKPYTTEEGKKRIDKSYDLYIDRAMIEQEFDALWAAQAAFNPTLFHEAARADLKDTLLHQRPLRPVKPGRCTLLPEEERAPLALPSTQRFRIHQEVNHLRLLDENLREVALTLAQRDAVVTALETKAKLSFEQIRKLLKLSGSVQFNLEDAKRTELKGNATSAALARKELFGAAWSGFDEALQDEIVWQLVTEEGEGALIAWLQTHTGVDEARAQAIVDVSLPEGYGNLSRKALARIVPALRAAVITYDKAVQAAGFDHHSQLGFEYDASEVEDLVHPETGEIRSVFKQLPYYGKALQRHVAFGSGKPEDPDEKRYGKIANPTVHIGLNQVRMVVNALIRRYGRPTEVVIELARDLKQSREQKVEAQRRQADNQRRNARIRRSIAEVLGIGEERVRGSDIQKWICWEELSFDAADRRCPYSGVQISAAMLLSDEVEVEHILPFSKTLDDSLNNRTVAMRQANRIKRNRTPWDARAEFEAQGWSYEDILQRAERMPLRKRYRFAPDGYERWLGDDKDFLARALNDTRYLSRVAAEYLRLVCPGTRVIPGQLTALLRGKFGLNDVLGLDGEKNRNDHRHHAVDACVIGVTDQGLMQRFATASAQARGDGLTRLVDGMPMPWPTYRDHVERAVRHIWVSHRPDHGFEGAMMEETSYGIRKDGSIKQRRKADGSAGREISNLIRIHEATQPLRHGVSADGQPLAYKGYVGGSNYCIEITVNDKGKWEGEVISTFRAYGVVRAGGMGRLRNPHEGQNGRKLIMRLVIGDSVRLEVDGAERTMRIVKISGSNGQIFMAPIHEANVDARNTDKQDAFTYTSKYAGSLQKAKTRRVTISPIGEVRDPGFKG

SEQ ID NO: 204 - protein, 1422 aa, Sutterella wadsworthensis
MTQSERRFSCSIGIDMGAKYTGVFYALFDREELPTNLNSKAMTLVMPETGPRYVQAQRTAVRHRLRGQKRYTLARKLAFLVVDDMIKKQEKRLTDEEWKRGREALSGLLKRRGYSRPNADGEDLTPLENVRADVFAAHPAFSTYFSEVRSLAEQWEEFTANISNVEKFLGDPNIPADKEFIEFAVAEGLIDKTEKKAYQSALSTLRANANVLTGLRQMGHKPRSEYFKAIEADLKKDSRLAKINEAFGGAERLARLLGNLSNLQLRAERWYFNAPDIMKDRGWEPDRFKKTLVRAFKFFHPAKDQNKQHLELIKQIENSEDIIETLCTLDPNRTIPPYEDQNNRRPPLDQTLLLSPEKLTRQYGEIWKTWSARLTSAEPTLAPAAEILERSTDRKSRVAVNGHEPLPTLAYQLSYALQRAFDRSKALDPYALRALAAGSKSNKLTSARTALENCIGGQNVKTFLDCARRYYREADDAKVGLWFDNADGLLERSDLHPPMKKKILPLLVANILQTDETTGQKFLDEIWRKQIKGRETVASRCARIETVRKSFGGGFNIAYNTAQYREVNKLPRNAQDKELLTIRDRVAETADFIAANLGLSDEQKRKFANPFSLAQFYTLIETEVSGFSATTLAVHLENAWRMTIKDAVINGETVRAAQCSRLPAETARPFDGLVRRLVDRQAWEIAKRVSTDIQSKVDFSNGIVDVSIFVEENKFEFSASVADLKKNKRVKDKMLSEAEKLETRWLIKNERIKKASRGTCPYTGDRLAEGGEIDHILPRSLIKDARGIVFNAEPNLIYASSRGNQLKKNQRYSLSDLKANYRNEIFKTSNIAAITAEIEDVVTKLQQTHRLKFFDLLNEHEQDCVRHALFLDDGSEARDAVLELLATQRRTRVNGTQIWMIKNLANKIREELQNWCKTTNNRLHFQAAATNVSDAKNLRLKLAQNQPDFEKPDIQPIASHSIDALCSFAVGSADAERDQNGFDYLDGKTVLGLYPQSCEVIHLQAKPQEEKSHFDSVAIFKEGIYAEQFLPIFTLNEKIWIGYETLNAKGERCGAIEVSGKQPKELLEMLAPFFNKPVGDLSAHATYRILKKPAYEFLAKAALQPLSAEEKRLAALLDALRYCTSRKSLMSLFMAANGKSLKKREDVLKPKLFQLKVELKGEKSFKLNGSLTLPVKQDWLRICDSPELADAFGKPCSADELTSKLARIWKRPVMRDLAHAPVRREFSLPAIDNPSGGFRIRRTNLFGNELYQVHAINAKKYRGFASAGSNVDWSKGILFNELQHENLTECGGRFITSADVTPMSEWRKVVAEDNLSIWIAPGTEGRRYVRVETTFIQASHWFEQSVENWAITSPLSLPASFKVDKPAEFQKAVGTELSELLGQPRSEIFIENVGNAKHIRFWYIVVSSNKKMNESYNNVSKS

SEQ ID NO: 205 - protein, 1132 aa, Nitratifractor salsuginis
MKKILGVDLGITSFGYAILQETGKDLYRCLDNSVVMRNNPYDEKSGESSQSIRSTQKSMRRLIEKRKKRIRCVAQTMERYGILDYSETMKINDPKNNPIKNRWQLRAVDAWKRPLSPQELFAIFAHMAKHRGYKSIATEDLIYELELELGLNDPEKESEKKADERRQVYNALRHLEELRKKYGGETIAQTIHRAVEAGDLRSYRNHDDYEKMIRREDIEEEIEKVLLRQAELGALGLPEEQVSELIDELKACITDQEMPTIDESLFGKCTFYKDELAAPAYSYLYDLYRLYKKLADLNIDGYEVTQEDREKVIEWVEKKIAQGKNLKKITHKDLRKILGLAPEQKIFGVEDERIVKGKKEPRTFVPFFFLADIAKFKELFASIQKHPDALQIFRELAEILQRSKTPQEALDRLRALMAGKGIDTDDRELLELFKNKRSGTRELSHRYILEALPLFLEGYDEKEVQRILGFDDREDYSRYPKSLRHLHLREGNLFEKEENPINNHAVKSLASWALGLIADLSWRYGPFDEIILETTRDALPEKIRKEIDKAMREREKALDKIIGKYKKEFPSIDKRLARKIQLWERQKGLDLYSGKVINLSQLLDGSADIEHIVPQSLGGLSTDYNTIVTLKSVNAAKGNRLPGDWLAGNPDYRERIGMLSEKGLIDWKKRKNLLAQSLDEIYTENTHSKGIRATSYLEALVAQVLKRYYPFPDPELRKNGIGVRMIPGKVTSKTRSLLGIKSKSRETNFHHAEDALILSTLTRGWQNRLHRMLRDNYGKSEAELKELWKKYMPHIEGLTLADYIDEAFRRFMSKGEESLFYRDMFDTIRSISYWVDKKPLSASSHKETVYSSRHEVPTLRKNILEAFDSLNVIKDRHKLTTEEFMKRYDKEIRQKLWLHRIGNTNDESYRAVEERATQIAQILTRYQLMDAQNDKEIDEKFQQALKELITSPIEVTGKLLRKMRFVYDKLNAMQIDRGLVETDKNMLGIHISKGPNEKLIFRRMDVNNAHELQKERSGILCYLNEMLFIFNKKGLIHYGCLRSYLEKGQGSKYIALFNPRFPANPKAQPSKFTSDSKIKQVGIGSATGIIKAHLDLDGHVRSYEVFGTLPEGSIEWFKEESGYGRVEDDPHH

SEQ ID NO: 206 - protein, 1327 aa, Solobacterium moorei
MEGQMKNNGNNLQQGNYYLGLDVGTSSVGWAVTDTDYNVLKFRGKSMWGARLFDEASTAEERRTHRGNRRRLARRKYRLLLLEQLFEKEIRKIDDNFFVRLHESNLWADDKSKPSKFLLFNDTNFTDKDYLKKYPTIYHLRSDLIHNSTEHDIRLVFLALHHLIKYRGHFIYDNSANGDVKTLDEAVSDFEEYLNENDIEFNIENKKEFINVLSDKHLTKKEKKISLKKLYGDITDSENINISVLIEMLSGSSISLSNLFKDIEFDGKQNLSLDSDIEETLNDVVDILGDNIDLLIHAKEVYDIAVLTSSLGKHKYLCDAKVELFEKNKKDLMILKKYIKKNHPEDYKKIFSSPTEKKNYAAYSQTNSKNVCSQEEFCLFIKPYIRDMVKSENEDEVRIAKEVEDKSFLTKLKGTNNSVVPYQIHERELNQILKNIVAYLPFMNDEQEDISVVDKIKLIFKFKIPYYVGPLNTKSTRSWVYRSDEKIYPWNFSNVIDLDKTAHEFMNRLIGRCTYTNDPVLPMDSLLYSKYNVLNEINPIKVNGKAIPVEVKQAIYTDLFENSKKKVTRKSIYIYLLKNGYIEKEDIVSGIDIEIKSKLKSHHDFTQIVQENKCTPEEIERIIKGILVYSDDKSMLRRWLKNNIKGLSENDVKYLAKLNYKEWGRLSKTLLTDIYTINPEDGEACSILDIMWNTNATLMEILSNEKYQFKQNIENYKAENYDEKQNLHEELDDMYISPAARRSIWQALRIVDEIVDIKKSAPKKIFIEMAREKKSAMKKKRTESRKDTLLELYKSCKSQADGFYDEELFEKLSNESNSRLRRDQLYLYYTQMGRSMYTGKRIDFDKLINDKNTYDIDHIYPRSKIKDDSITNRVLVEKDINGEKTDIYPISEDIRQKMQPFWKILKEKGLINEEKYKRLTRNYELTDEELSSFVARQLVETQQSTKALATLLKKEYPSAKIVYSKAGNVSEFRNRKDKELPKFREINDLHHAKDAYLNIVVGNVYDTKFTEKFFNNIRNENYSLKRVFDFSVPGAWDAKGSTFNTIKKYMAKNNPIIAFAPYEVKGELFDQQIVPKGKGQFPIKQGKDIEKYGGYNKLSSAFLFAVEYKGKKARERSLETVYIKDVELYLQDPIKYCESVLGLKEPQIIKPKILMGSLFSINNKKLVVTGRSGKQYVCHHIYQLSINDEDSQYLKNIAKYLQEEPDGNIERQNILNITSVNNIKLFDVLCTKFNSNTYEIILNSLKNDVNEGREKFSELDILEQCNILLQLLKAFKCNRESSNLEKLNNKKQAGVIVIPHLFTKCSVFKVIHQSITGLFEKEMDLLK

SEQ ID NO: 207 - protein, 738 aa, Treponema phagedenis
MLQELFAKEIAKIDEGFFRRLDESAFYLEDKSLKQKYSLFNDDNFTDKDYYKKFPTIHHLIKALINDETHVDIRLLYLACHTIIKNRGHFLFEGKEFNTESRFDDAINELFSYLRQDMEIDFAFEDKIADIKEILENKKIGMRDKQNALNKKLSIAPKDKQKKEIIKLIVGASFNLKTLFNDEKYSSEKESYSFAKSNYEEKEAVLESLLGDGFGLILRAKAVYDSSVLSEILGNETYLSFAKVKIYDKHKEDLAKLKKVIKTYHADEFKKVFAEANIQGNYCSYVGSCKKNGKKVPIEKRADKDAFYDFLKKILKDEKAKNSDADYAFILNEIELKTFLPKQVSKKNANIPYQLRRMELEKIVNNAEKYFSFLSEKDEYGTVKEKIIQLLTFKRPYYIGIIQDTHKEKFPDRCWVVKKENAKNEKITPWNFYDHIDEDKTAEAFITSRTNKCTYLIGEDVLPRNSLLYMEYTVLNELNNLKVSVDGVNIFDVKLKKKIYEQVFKQRKEVSKKTIADFLKKEGICKKENDVVITGIDEKCTTSLKLYIDIKKIIGKRIEEEPTKNALEDIILWASIYDEGEGRKILEAKIQSVYPDVFTQDELNKILKLKISGWGRFSRKFLESIVASFPGFTDTINIITAMRETNFNLMELLGDAYGFSKGIEKFNSKFNDDKKVFSYDKLVKDLYLSPSVKRMLWRALVIVKEVKSIMGKDPKKYLLKWQEEKKLKREGLPPAMQV

SEQ ID NO: 208 - protein, 1377 aa, Streptococcus equinus
MEKTYSIGLDIGTNSVGWAVITDDYKVPAKKMKVLGNTDKKYIKKNLLGALLFDSGETAEATRLKRAARRRYTRRKNRLRYLQEIFAKEMAKVDESFFQRLEESFLTDDDKTFDSHPIFGNKAEEDTYHQEFPTIYHLRKHLADSPEKVDLRLVYLALAHMIKFRGHFLIEGQLNAENTDVQKIFADFVGVYDRTFDDSHLSEITVDAASILTEKISKSRRLENLIKQYPTEKKNTLFGNLVALALGLQPNFKTNFKLSEDAKLQFSKDTYDEDLEELLGKIGDDYADLFTAAKNLYDAILLSGILTVDDNSTKAPLSASMIKRYEEHHEDLEKLKTFIKVNNFDKYHEIFKDKSKNGYAGYIENGVKQDIFYKHLKSIISEKNGGQYFLDKIEREDFLRKQRTFDNGSIPYQIHLQEMRTILRRQGEYYPFLKENQAKIEKILTFRIPYYVGPLARKNSRFAWAKYHSDEPITPWNFDEVVDKEKSAEKFITRMTLNDLYLPEEKVLPKHSYVYETFAVYNELTKIKYVNEQGKSFFFDANMKQEIFDHVFKENRKVTKAKLLSYLNNEFEEFRINDLIGLDKDSKSFNASLGTYHDLKKILDKSFLDDKTNEQIIEDIVLTLTLFEDRDMIHERLQKYSDIFTSQQLKKLERRHYTGWGRLSYKLINGIRNKENNKTILDFLIDDGDANRNFMQLINDDSLSFKTTIQEAQVVGDVDDIEAVVHDLPGSPAIKKGILQSVKIVDELVKVMGHNPQNIVIEMARENQITGYGRNRSNQRLKRLQDSLKEFGSDILSKKKPSYVDSKVENSHLQNDRLFLYYIQNGKDMYTGEELDIDHLSDYDIDHIIPQAFIKDNSIDNRVLTSSAKNRGKSDDVPSIEIVRNRKSYWYKLYKSGLISKRKFDNLTKAERGGLTETDKAGFIKRQLVETRQITKHVAQILDARFNTKCDENDKVIRDVKVITLKSSLVSQFRKEFKFYKVREINDYHHAHDAYLNAVVGTALLKKYPKLAPEFVYGEYKKYDVRKLVAKSSDNHSELGKATAKYFFYSNLMNFFKTEVKYADGRVFERPDIETNADGEVVWNKQRDFNIVRKVLSYPQVNIVKKVEVQTGGFSKESILPKGDSDKLIPRKTKKLQWETQKYGGFDSPTVAYSVLVVADVEKGKTRKLKTVKELVGISIMERSSFEENPVSFLEKKGYHNVQEDKLIKLPKYSLFEFEGGRRRLLASATELQKGNEVVLPQYMVNLLYHSQHVNNSHKPEHLNYVKQHKDEFKDIFNLIISIARINILKPKVVDNLINEFTEYGQEDISSLSESFINLLKFISFGAPGAFKFLKLDVKQSNLRYKSTTEALSATLIHQSVTGLYETRIDLSKLGEE

SEQ ID NO: 209 - protein, 1128 aa, Streptococcus vestibularis
MSDLVLGLDIGIGSVGVGILNKVTGEIIHKNSRIFPAAQAENNVERRTNRQGRRLTRRKKHRRVRLNHLFEESGLITDFTKVSINLNPYQLRVKGLIDELSNEELFIALKNMVKHRGISYLDDASDDGNSSVGDYAQIVKENSKQLETKTPGQIQLERYQKYGQLRGDFTVEEDGKKHRLINVFPTSAYRSEALRILQTQKEFNPQITDEFINRYLEILTGKRKYYHGPGNEKSRTDYGRYTTKKDSENEYITLDNIFGILIGKCTFYPEEYRAAKASYTAQEFNLLNDLNNLTVPTETKKLSEEQKNQIINYVKNEKAMGPAKLFKYIAKLLSCDVADIKGYRIDKSDKAEIHTFEAYRKMKTLETIDFEKMSRDQLDKLAYVLTLNTEREGIQEALDHEFADGNFSQEQIDELVQFRKANSSIFGKGWHNFSVKLMMELIPELYATSEEQMTILTRLGKQKTTSSSNKTKYIDEKLLTEEIYNPVVAKSVRQAIKIVNAAIKEYGDFDNIVIEMARETNEDDEKKAIQKIQKANKDEKDAAMLKAANQYNGRAELPHSVFHGHKQLATKIRLWHQQGERCLYTGKTISIHDLINNPNQFEIDHILPLSITFDDSLANKVLVYATANQEKGQRTPYQALDSMDDAWSFRELKAFVRESKSLSNKKKEYLLTEEDISRFDVRKKFIERNLVDTRYASRVVLNALQEHFRAHKTDTKVSVVRGQFTSQLRRHWGIEKTRDTYHHHAVDALIIAASSQLNLWKKQKNTLVNYSENQLLDIETGELISDDEYKESVFKAPYQHFVDTLKSKEFEDSILFSYQVDSKFNRKISDATIYATRQAKVGKDKKDETYVLGKIKDIYSQTGYDAFIKIYQKDKSKFLMYRHDPQTFEKVIEPILENYPNKEMNEKGKEVPCNPFLKYKEEHGDYIRKYSKKGNGPEIKSLKYYDSKLGNHIDITPKDSNNKVVLQSVSPWRADVYFNKTTGKYEILGLKYADLQFEKGTGTYKISQEKYNVIKKKEGVDSDSEFKFTLYKNDLLLIKDTETKEQQLFRFLSRTKPNVKHYVELKPYDKQKFEGNESLINVLGAVAKGGQCQKGINKPNISIYKVRTDVLGNQHIIKNEGDKPKLDF

SEQ ID NO: 210 - protein, 1080 aa, Methylocystis sp.
MRVLGLDGGIASIGWALIEIFEDHEPSDGRIIDTGAWMFDAPEEKSQTGTKLKSELRRIFRGQRRVIRRRRQRMNEVRRILHRHGLLSSDNRDALKQPGLDPWKIRAEGIDRLLSPIEFAVALGHIARHRGFKSNSKGAKTSDLDAESSRMKKAVGETREKLARFGSPAKLLVEDEGFVLRQTKLKSGALETVRRFRNRDGDYSRSLLRDDLAAEVRALFRAQARLQSTFAKVELEAEFTQAAFFQRPLQDSERLVGPCPFEPAEKRSPKRGYSFELFRFLSRLNHLTLREGSEERTLTVEELRTAAADFGGVAKFTFSTLRKRLALPDIAIFVGIKADDEKKLDVVARSGEAATGTARLRRVVIDALGELAWGALISAPERLDKITEIITFRSDLDRIRAGLIEAGFDTPLIEAIVRAAADGKLDAFTGVGHISAKAARNIIPGLMRGMTYDKACAAAGYDHTASRERDAFDVGMHGKEALKKILQEERISRELVGSPSARKALIEAVKQVKAIIEKYGVPDRIHVELARDVGKSIEERRDIHFGIEKRSRQKDKLRELFGKEVGHLPQDGERGKEELLRFELWNEQMGRCLYTDEYINPKQLVASDNSVQVDHILPWSRFGDDSYLNKTLCTAKANQDKKGRTPYEWFRADKPEAEWDAFVARVESIQFMKGLKKRNYKLKNAEEAAEKFRSRNLNDTRWTCRLLAEALKQLYPKGEKDKDGKERRRVFTRPGALTNRLRRAWSLQRRKKSEKGERIADDRHHALDAIIVAATTESLLIRATREVQDIERKGLHYDLTKNITQPWPGFADEALDAVEKVFVARAERRRARGKAHDATIRHIAVRDDEAKVYERKKVGDIKLGDLIRVKDAERNAPLIENLRKWIEAGSPRDNPPLSPKGDPVSKVRLVTKNKVNITLDTGNPERLATVDRGEMARVDVFRKANRKGKYEYYLVPIYPHEIATMETPPMRAVQGGGDDDKWPEIDSTFEFLWSINQLSLLELTKPDGEVIRSYFRSLDRNTGALTVSGIANSTATRKGIGTRTLIDFKKLHVDRLGQIFEVERELRTWRGETWRGKDCI

SEQ ID NO: 211 - protein, 1087 aa, Phascolarctobacterium succinatutens
MLRMKYAIGLDIGIASVGYAVLALDHEENPWGIIRLGSRIFDVAENPKDGASLALPRREARSVRRRLRRHHHRLERIKNLLINTEFITKDELLHLYDGNLSDVYELRVKALDYSVTNAELTRILLHLAQRRGFKSNRKSDANDKEAGQLLEAVSANAKRMQENHYRTVGEMFYKDDLFSKYKRNKGGTYLTTVHRDMIAAEARTILEKQFALGNNICTQDFIDKYLSILLSQRQFDEGPGEPSPYAGNQIANMIGKCTFEPNEYRAAKASYSFERFNLLQKVNHLRLLLEGKSIALDNEQRKKIIALAHDKADLRYSHIRKALGLDEKVLFNTITYNDDVSVIEKKTKFNFLQAYHQIKKVLAEDMQKLTTEQLDNIGQILSTYKSDNKRTEELSALGLEKKIIDALLGINGLSKFAHLSLKALRKINPYLEEGKIYNEACTAAGYDFKAHANTQKTELLPAYKEEMDDITSPVARRAIAQSIKVINAIIREQKGSPLYINIELAREMAKGFDERTQIDKANKENQAKNERIMERIRTEFHKANPTGMDLIKLKLWEEQDGRSPYSQKAISINRLFEPGYVDIDHIVPYSISFDDSFKNKVLVFSDENRDKGNRLPIAYLQSKFGAKAAENFMIWVQSNIKDYKKRQKLLKREITEEDINKFKERNLQDTKTISRFLYNYINDYLLFAPSDTGKKKRVTAVNGTITAYLRKRWGINKIRANGDKHHAVDAVVIACTTDKMIKDLSSFSRYHELEYTHTDTESFLVNSLTGEILKRFPYPWEDFRPELMARLSDNPADALRKLNLIFYHGIDLSTIKPIFVSRMPRHKVTGAAHKATIKSARCLDNGIVICKTSLQNLKLDKEGEIANYYAPESDTILYNALKERLRSYDNKPAKAFAEPFYKPKADGTPGPLVKKVKVYEKSTLNVAVQQNTAVADNDSMVRVDVFHVKGNGYYLVPIYIADTLKKELPNKAIVAYKPYADWPVMDDSNFIFSLYPNDLIKFEHKNSVKFAKVNKESTLNDFYSTKSEIVYFKGCNINTGAITIINHENTYVVSSLGVKTLPSLEKYQADVLGNYTKVKKEVRKPFR

SEQ ID NO: 212 - protein, 1375 aa, Lactobacillus ruminis
MRKNQEPYNIGLDIGTSSIGWSIMNDNFDLMRVKGKKGIGVRLYNEGQSAAERRMHRTARRRYGRRKWRLRLLEDFFDEHMAEVDDTFFARLKDSNISPKDDKKYRKSLLFPKSKGVTYQDDGEFYKKYPTMYHLRYALMTEHRKFDLREIYLAFHHMVKYRGNFLYDTSVDSFEAKNLDIKGKFDEINDLLSSYTDFYVDNSNAALVESILLEKNTTRKDKSKKIAKLLHVEDKEKGKNKKAKDLATQISNAVLGLKCNFHLIFELQQKYSFDLCSEKTEENIAKLSEVLDENQKMLLMILKEVQDQVMLNAFVPSGMSLSEAMMQKYDDYGEQLKIYHELEHSVSDDSAAKLRGAYRDYNDNIIKRIDGDNKKDTFYKRVKNILTKISKEYVDQDVLESCGKLKKLIDENKLFIRQRTAANGVLPHQLHQIEMRKIIDNQKEYYPWLAEPNPNEKRRVYSKYKVEELIAFRIPYYVGPLVDPNNADKNKEARFSWMVRKKDGEITPWNFYDKVDWAESANNFIERMKSKDTYLLGEDVVPKESMLYQKYEVLNELNNLRINDSGLSDSFEDVKLKQAIYNDLFKKQKIVKITDLQNYLVQNHKYLVKPKISGLADENRFLSSLSTYSDLKTIFGDKVDDRTYFNDFEKMVEYSTVFEDGHDYNQKLDEYTWLTKEEKYKIGKKRYRGWGKLSKKLLTGLRDKNNHTIMDNLWETNRNFMQIQTADEFSKQIAEENERHLKGSVSDAINDMYTSPANKKAIRQVLRVVDDIQKAMGYAPSSISLEFAREDGPSVRTVSRANRMKSIYEKYASEVSEEVMKDLDGVIKDKKGLNDRLYLYFEQQGKDMYSGHPLDFDKVISGQEYDIDHILPQAVIKDDSLDNRVLTTKALNNDVKSKGVPCRMFNGMHSFWKNLYDKGFISRRKFNNLTTNPENIDKYKMKGFVNRQLVETRQIIKLVANVLNDKYQNDDVDIIEVRAELTHDVRKHFKFYKNRNVNDYHHAFDAYLTSFIGHYLFKKYPNLRPLFDYNDFMKVSDNVFKQLRGNNFLGEFLNKTGDIISTDGNFVLNKEEMINKLNKAYAFKKILVTKEVGQRTGAMFNETRYPAPNSRKAALKYRRMPKPDSLISVKDYKNTDIYGGYSGKNDAYMVIVDMGKQYMVVGVPVRYTEKLDKLRIKHSELYRDELRKVLSRDKTLLDSKGNVKRFDIVLDRVLYGQLIEDGNELFTLGSSKYKRNFRQLFLDKQCIEILDSSATPQPTDEELIWVYDQILDKVDKYFELYDINRQRETLRKGRAAFCSLPNISMKKDDVTKKKILNEILVALHANESESNCEKIGKKVFGRLQVPGGIKLSKEAKLIYQSPTGLFERVVYLKDL

SEQ ID NO: 213 - protein, 1391 aa, Prevotella oralis
MKKILGLDLGTTSIGWALVNEKENNEELSSIIRLGVRVNPLTVDEKSNFEKGKDITTNADRTKCRSARRNLQRFKLRREALADCLKRHGLMTDETPLCETNNSIIFKTYSNRAKAVCEKIALDDFVRVLFMINKKRGYKSSRKLNTDDEGTLVDGMDVAKLLYNEQITPGEYLLRLFKKGKKTRPDFYLSDLKAELERIWDFQRTFYPEILCNALKEDLKGKSRTQSSAIFYAKYKVSTAKIAGKDKRLQELTWRTDALRKQLTIDEVAYVICSINGEVNGSSQRLSMISDRSKLLYFNHQTIGQYLMQRLEENPNAGLKNIIFYRQDYEDEFNDIWNSQATYHKELTPELKKEVKDIIFYQRGLKSCKWLINYCELEHEEIEVKTPEGKLRKITIGSKTCPKSSPLFQEFKIWQVLNNLQVSPLNSRRKAKRKKDEEPSLFSDEDMNTACRYLNEEEKLTLFKELSIKKELKKKDALKLLFENYKELDLNYKVISGNVTMANLYRAFQDIISLTGNGEFDFQAMPAEEAEKTVEEIFGGLGYKTAFLHFDASLHDKEFERQPAYRLWHLLYSYAGDQSKTGIEALVKRIQELCGFEPEYARILANISFIPDYGNLSSKAMRKILPYMQDGYEYSEACSKAGYRHSASSLTKEEINKKNYKTHLDEIKRNSLRNPIVEKILNQMVNVVNSVIDTYSNIDEIRIEMARELKKSKPEREDMSFAISKATKETERIKGILEQEFKIQHVTRNDIIRYRLYEELKPNGYKTLYSNTYIPREDLFSKKFDIEHIIPKARLFDDSYSNKTLELRDINIEKGNQTAYDFVLSKYGEEGLYKYEQRVEEFKKNNEQAGTKCRKLLMREADIPSDFLNRDLNDSQYIAKKAHELLREIVPTVTATTGSITNRLREDWKLVNVMKELNWEKYDKLGLTEEYKDKDGNTVRHIKDWTKRNDHRHHAMDALTIAFTKPSFIQYLNNLNARSNRGGSIYGIEQKELERENNKLVFIPPIDPKIFRKQAKEHLSNILISIKAKNKVVTKNVNKTKSKSGTNRKVQLTPRGQLHLETVYGKIRTYKTEEIKVGTKLTEELIAKVADKKIREALMQRLSEYGGNIKKAFQNISKHPIWLNGSHTKHVPEKVKIVFFEDVFTIRKAITPDIKIDKVIDSKIRRILQERLNEFGGEASKAFSNLDENPIWFNRDKGIAIKSVKIRGIAKGTAIRVKKDIHGKTIIGNNGYPVANDYVNTGNNHHVAIFRDKDGNLQEHIVSFYEATARAIQNLPIVDRNYNSEKDWKFLFSMKQNEYFVFPNPNTGFNPSEISLKDEKNYALISPNLFRVQKLSHYYYVFRHHLETNVDTNLQLKDITWKRITAVNNLTGAVKVRIDHLGRIVDVGEYK

SEQ ID NO: 214 - protein, 1167 aa, Streptococcus sanguinis
MLFGLKTKFKDCFELEEEPDLNFSKENYDDNLEKLLGELGEDFSDVFDKLKILRDTILLSGMLTYTGATHARFSATMVERYEEHRKDLQRFKSFIKQNLSEQDYLDIFGRKTQNGFDVDKETKGYVGYITNKMVLTNPQKQKTIQQNFYDYISGKITGIEGSEYFLNKISDRTFLRKLRTSDNGAIPNQIHAYELEKIIERQGKDYPFLLENKDKLLSILTFKIPYYVGPLAKGNNSRFAWIKRANSSDILDDNDEDTRNGKIRPWNYHKLINMDETRDAFITNLIGNDTILLNEKVLPKRSLIYEEVMLQNELTRVKYKDKYGKAHFFDSEHRQNIINGLFKINSKRVNAERLIKYLSDNHKDLNAIEIVSGVEKGKSFNSTLKTYNDFKTIFSEEFLDSEIYQKELEEIIKVITVFDDKKSIKNYLTKYFGHLEFLDEEKINQLSKLRYTGWGRYSAKLLLDIRDEDTGFNLLQFLRNDEENRNLTNLISDNTLSFDPKIKAIQSKSTVEDDVFDEIKKLAGSPAIKRGILNSIKIVDELVQIIGYPPQNIVIEMARENMTTEEGQKKTKTRKSKLESALKNIENSVLENGKVLHSDEQLQSEKLYLYYLQNGKDIYSLDETGSPAPIYLDQLDQYEVDHIIPYSFLPIDSIDNKVLTHRKNNQRKLDNIPDKETVAHMKPFWEALYNAKLISQTKYQRLTTSERTPDGVLTESMKAGFIERQLVETRQIIKHVARILDNRFSDTKIITLKSQLVTNFRNTFHIAKIRELNDYHHAHDAYLAVVVGQTLLKAYPKLAPELIYGHHVHFNRHEENKATLRKHLYSNIMRFFNNPDSKVSKDIWDCNRDLPIIKHVIYNSQINFVKRTMIKKGAFYNQNPVGKFNKQLAANNRYPLKTKALCLDTSIYGGYGPMNSTLSIIIIAERFNEKKGKIETVKEFHDIFIIDYEKFNNNPFQFLNDTSENGFLKKNNINRVLGFYRIPKYSLMQKIDGTRMLFESKLNLHKATQFKLTKTQNELFFHMKRLLTNSNLMDLKSESAIKESQNFILKHKEEFDNISNQLSAFSQKMLGNTTSLKNLIKGYNERKIKEIDIREETIKYFYDNFIKMFSFVKSGAPKDINDFFDNKYTVARMRPKPDKRLLNATLIHQSITGLYETRIDLSKLGED

SEQ ID NO: 215 - protein, 1334 aa, Staphylococcus pseudintermedius
MGRKPYILSLDIGTGSVGYACMDKGFNVLKYHDKDALGVYLFDGALTAQERRQFRTSRRRKNRRIKRLGLLQELLAPLVQNPNFYQFQRQFAWKNDNMDFKNKSLSEVLSFLGYESKKYPTIYHLQEALLLKDEKFDPELIYMALYHLVKYRGHFLFDHLKIENLTNNDNMHDFVELIETYENLNNIKLNLDYEKTKVIYEILKDNEMTKNDRAKRVKNMEKKLEQFSIMLLGLKFNEGKLFNHADNAEELKGANQSHTFADNYEENLTPFLTVEQSEFIERANKIYLSLTLQDILKGKKSMAMSKVAAYDKFRNELKQVKDIVYKADSTRTQFKKIFVSSKKSLKQYDATPNDQTFSSLCLFDQYLIRPKKQYSLLIKELKKIIPQDSELYFEAENDTLLKVLNTTDNASIPMQINLYEAETILRNQQKYHAEITDEMIEKVLSLIQFRIPYYVGPLVNDHTASKFGWMERKSNESIKPWNFDEVVDRSKSATQFIRRMTNKCSYLINEDVLPKNSLLYQEMEVLNELNATQIRLQTDPKNRKYRMMPQIKLFAVEHIFKKYKTVSHSKFLEIMLNSNHRENFMNHGEKLSIFGTQDDKKFASKLSSYQDMTKIFGDIEGKRAQIEEIIQWITIFEDKKILVQKLKECYPELTSKQINQLKKLNYSGWGRLSEKLLTHAYQGHSIIELLRHSDENFMEILTNDVYGFQNFIKEENQVQSNKIQHQDIANLTTSPALKKGIWSTIKLVRELTSIFGEPEKIIMEFATEDQQKGKKQKSRKQLWDDNIKKNKLKSVDEYKYIIDVANKLNNEQLQQEKLWLYLSQNGKCMYSGQSIDLDALLSPNATKHYEVDHIFPRSFIKDDSIDNKVLVIKKMNQTKGDQVPLQFIQQPYERIAYWKSLNKAGLISDSKLHKLMKPEFTAMDKEGFIQRQLVETRQISVHVRDFLKEEYPNTKVIPMKAKMVSEFRKKFDIPKIRQMNDAHHAIDAYLNGVVYHGAQLAYPNVDLFDFNFKWEKVREKWKALGEFNTKQKSRELFFFKKLEKMEVSQGERLISKIKLDMNHFKINYSRKLANIPQQFYNQTAVSPKTAELKYESNKSNEVVYKGLTPYQTYVVAIKSVNKKGKEKMEYQMIDHYVFDFYKFQNGNEKELALYLAQRENKDEVLDAQIVYSLNKGDLLYINNHPCYFVSRKEVINAKQFELTVEQQLSLYNVMNNKETNVEKLLIEYDFIAEKVINEYHHYLNSKLKEKRVRTFFSESNQTHEDFIKALDELFKVVTASATRSDKIGSRKNSMTHRAFLGKGKDVKIAYTSISGLKTTKPKSLFKLAESRNEL

SEQ ID NO: 216 - protein, 1156 aa, Ruminococcus albus
MGNYYLGLDVGIGSIGWAVINIEKKRIEDFNVRIFKSGEIQEKNRNSRASQQCRRSRGLRRLYRRKSHRKLRLKNYLSIIGLTTSEKIDYYYETADNNVIQLRNKGLSEKLTPEEIAACLIHICNNRGYKDFYEVNVEDIEDPDERNEYKEEHDSIVLISNLMNEGGYCTPAEMICNCREFDEPNSVYRKFHNSAASKNHYLITRHMLVKEVDLILENQSKYYGILDDKTIAKIKDIIFAQRDFEIGPGKNERFRRFTGYLDSIGKCQFFKDQERGSRFTVIADIYAFVNVLSQYTYTNNRGESVFDTSFANDLINSALKNGSMDKRELKAIAKSYHIDISDKNSDTSLTKCFKYIKVVKPLFEKYGYDWDKLIENYTDTDNNVLNRIGIVLSQAQTPKRRREKLKALNIGLDDGLINELTKLKLSGTANVSYKYMQGSIEAFCEGDLYGKYQAKFNKEIPDIDENAKPQKLPPFKNEDDCEFFKNPVVFRSINETRKLINAIIDKYGYPAAVNIETADELNKTFEDRAIDTKRNNDNQKENDRIVKEIIECIKCDEVHARHLIEKYKLWEAQEGKCLYSGETITKEDMLRDKDKLFEVDHIVPYSLILDNTINNKALVYAEENQKKGQRTPLMYMNEAQAADYRVRVNTMFKSKKCSKKKYQYLMLPDLNDQELLGGWRSRNLNDTRYICKYLVNYLRKNLRFDRSYESSDEDDLKIRDHYRVFPVKSRFTSMFRRWWLNEKTWGRYDKAELKKLTYLDHAADAIIIANCRPEYVVLAGEKLKLNKMYHQAGKRITPEYEQSKKACIDNLYKLFRMDRRTAEKLLSGHGRLTPIIPNLSEEVDKRLWDKNIYEQFWKDDKDKKSCEELYRENVASLYKGDPKFASSLSMPVISLKPDHKYRGTITGEEAIRVKEIDGKLIKLKRKSISEITAESINSIYTDDKILIDSLKTIFEQADYKDVGDYLKKTNQHFFTTSSGKRVNKVTVIEKVPSRWLRKEIDDNNFSLLNDSSYYCIELYKDSKGDNNLQGIAMSDIVHDRKTKKLYLKPDFNYPDDYYTHVMYIFPGDYLRIKSTSKKSGEQLKFEGYFISVKNVNENSFRFISDNKPCAKDKRVSITKKDIVIKLAVDLMGKVQGENNGKGISCGEPLSLLKEKN

SEQ ID NO: 217 - protein, 1440 aa, Weeksella virosa
MKTILGLDLGTNSIGWALVEQDFENKQGLILGMGSRIIPMDAGIIGKFAEGSSISQTAERTGYRSIRRLRERHLLRRERLHRVLNILKFLPEHYAAEIDFEKRFGQFLAETEPKLAWKKNAEGKFEFLFQRSFDEMVADFKANGQDIKIPYDWTIYYLRKKALTQKISPQELAWIILNFNQKRGYYQLRGEEEEENPNKKVEFYSLKIVDVVADEQPNKKGDTWYSLHLENGWVYRRSSKIPLYDWKDKVRDFIVTTDINEDGSEKLDKDGEVKRSFRAPKEDDWTLIKKKTEQEIEQFNQTVGSYIYEALLDNPTQKIRGKLVRTIERKFYKSELKKILEKQIELQPELFTEDLYNACARELYRRNVAHQQQLSSRDFVYLFLNDIIFYQRPLRSQKSLISNCSLEFRTIKDKDGNGQIIYLKAIPKSNPYYQEFRVWQWLYNLKIFTKEDDKDVTNQFINKVEDLEALFEFLMNQKEVNHTDILTYLIEPIVKSKYPNAKGKAFKDELKKELKKYRWNYVYDADKDESKSYPMNETRYELRKRLDKVENVPADFMTRKIEQHLWHIIYSVTDKIEFEKALKSFANKYDLHQESFVENFKRFKPFDSDYGTYSEKAIKKLLPLMRVGKYWSWDIIDDKTKTRIGKIITGEYDETIKNRVREKAIDLTEENHFQGLQLWLAQYIVYDRHSEADIAGKWNSVADLEQYLSEFKQHSLRNPIVEQVITETLRVVRDIWKQYGKGAKDYFDEIHIELGREMKNTAEERKRLSSIISENETTNLRIRAILEELMYDENMENVRPYSPMQQEALKIYEDGVLSSSVEIPEDIEKISKKSEPTKSEIQRYKLWLEQKYRSPYTGRPIPLSKLFTPAYQIEHIIPQARFFDDGFSNKVICESEVNALKDKMLGLEFIQNYYGQKVTTSFGEVTILTEDAYKAFVKEHYDKNRSKRNKLLLEEIPEKMIDRQMNDTRYISKYISKVLSNLVRGEKDDEGVNSKNIIPGNGKITGILKQDWGLNDVWNDLILPRFERMNQLTNSTDFTAWNEKHQKFLPSVPLELSKGFQKKRIDHRHHALDALIIACATRDHVNLLNNKHAKSRNERYDLQHKLRHTTPWQDKEGKVRTKFTEFKKPWETFTQDTKKELEKIVVNFKQNLRVINKATNYYEKIVDGKKVMFKQEGVNWAIRKPMHKETVSGKIDLPRVKVSKGKILTATRKSLDTSFNAKTILSITDTGIQKILLNYLKAKGNPELAFSPEGIEEMNQNISLYNDGKPHQPILKVRVFEQGSKFPLGETGNKTTKYVEAAKGTNLFFGVYEDNQGKRSYDTIPLNIVIERQKQGLNSVPETNEKGHRLLFSLSPNDLVYVPIEGEVFDETNPDVNRIYKVVSFSGSQMFCVRQDVATSIVYKLEFSSLNKMERTIDGIMIKEICIKLKVDRLGNISKA

SEQ ID NO: 218 - protein, 1179 aa, Sphaerochaeta globus
MSKKVSRRYEEQAQEICQRLGSRPYSIGLDLGVGSIGVAVAAYDPIKKQPSDLVFVSSRIFIPSTGAAERRQKRGQRNSLRHRANRLKFLWKLLAERNLMLSYSEQDVPDPARLRFEDAVVRANPYELRLKGLNEQLTLSELGYALYHIANHRGSSSVRTFLDEEKSSDDKKLEEQQAMTEQLAKEKGISTFIEVLTAFNTNGLIGYRNSESVKSKGVPVPTRDIISNEIDVLLQTQKQFYQEILSDEYCDRIVSAILFENEKIVPEAGCCPYFPDEKKLPRCHFLNEERRLWEAINNARIKMPMQEGAAKRYQSASFSDEQRHILFHIARSGTDITPKLVQKEFPALKTSIIVLQGKEKAIQKIAGFRFRRLEEKSFWKRLSEEQKDDFFSAWTNTPDDKRLSKYLMKHLLLTENEVVDALKTVSLIGDYGPIGKTATQLLMKHLEDGLTYTEALERGMETGEFQELSVWEQQSLLPYYGQILTGSTQALMGKYWHSAFKEKRDSEGFFKPNTNSDEEKYGRIANPVVHQTLNELRKLMNELITILGAKPQEITVELARELKVGAEKREDIIKQQTKQEKEAVLAYSKYCEPNNLDKRYIERFRLLEDQAFVCPYCLEHISVADIAAGRADVDHIFPRDDTADNSYGNKVVAHRQCNDIKGKRTPYAAFSNTSAWGPIMHYLDETPGMWRKRRKFETNEEEYAKYLQSKGFVSRFESDNSYIAKAAKEYLRCLFNPNNVTAVGSLKGMETSILRKAWNLQGIDDLLGSRHWSKDADTSPTMRKNRDDNRHHGLDAIVALYCSRSLVQMINTMSEQGKRAVEIEAMIPIPGYASEPNLSFEAQRELFRKKILEFMDLHAFVSMKTDNDANGALLKDTVYSILGADTQGEDLVFVVKKKIKDIGVKIGDYEEVASAIRGRITDKQPKWYPMEMKDKIEQLQSKNEAALQKYKESLVQAAAVLEESNRKLIESGKKPIQLSEKTISKKALELVGGYYYLISNNKRTKTFVVKEPSNEVKGFAFDTGSNLCLDFYHDAQGKLCGEIIRKIQAMNPSYKPAYMKQGYSLYVRLYQGDVCELRASDLTEAESNLAKTTHVRLPNAKPGRTFVIIITFTEMGSGYQIYFSNLAKSKKGQDTSFTLTTIKNYDVRKVQLSSAGLVRYVSPLLVDKIEKDEVALCGE

SEQ ID NO: 219 - protein, 1370 aa, Streptococcus gallolyticus
MTKKNYSIGLDIGTNSVGWAVITDDYKVPAKKMKVLGNTDKKYIKKNLLGALLFDSGETAEATRLKRTARRRYTRRKNRLRYLQEIFAEEMTKVDESFFYRLDESFLTTDEKDFERHPIFGNKAEEDAYHQKFPTIYHLRNYLADSSEKADLRLVYLALAHMIKYRGHFLIEGKLNAENTDVQKLFTDFVGVYDRTFDDSHLSEITVDVASTLTEKISKSRRLENLIKYYPTEKKNTLFGNLIALALGLQPNFKMNFKLSEDAKLQFSKDTYEEDLEELLGKIGDDYADLFTSAKNLYDAILLSGILTVDDNSTKAPLSASMIKRYVEHHEDLEKLKEFIKANKSELYHDIFKDKNKNGYAGYIENGVKQDEFYKYLKNTLSKIDGSDYFLDKIEREDFLRKQRTFDNGSIPHQIHLQEMHAILRRQGDYYPFLKEKQDRIEKILTFRIPYYVGPLVRKDSRFAWAEYRSDEKITPWNFDKVIDKEKSAEKFITRMTLNDLYLPEEKVLPKHSHVYETYAVYNELTKIKYVNEQGKESFFDSNMKQEIFDHVFKENRKVTKEKLLNYLNKEFPEYRIKDLIGLDKENKSFNASLGTYHDLKKILDKAFLDDKVNEEVIEDIIKTLTLFEDKDMIHERLQKYSDIFTANQLKKLERRHYTGWGRLSYKLINGIRNKENNKTILDYLIDDGSANRNFMQLINDDTLPFKQIIQKSQVVGDVDDIEAVVHDLPGSPAIKKGILQSVKIVDELVKVMGDNPDNIVIEMARENQTTNRGRSQSQQRLKKLQSSLKELGSNILNEEKPSYIEDKVENSHLQNDQLFLYYIQNGKDMYTGDELDIDHLSDYDIDHIIPQAFIKDDSIDNRVLTSSAKNRGKSDDVPSLDIVRARKAEWVRLYKSGLISKRKFDNLTKAERGGLTEADKAGFIKRQLVETRQITKHVAQILDARFNTEHDENDKVIRDVKVITLKSNLVSQFRKDFEFYKVREINDYHHAHDAYLNAVVGTALLKKYPKLASEFVYGEYKKYDIRKFITNSSDKATAKYFFYSNLMNFFKTKVKYADGTVFERPIIETNADGEIAWNKQIDFEKVRKVLSYPQVNIVKKVETQTGGFSKESILPKGDSDKLIPRKTKKVYWDTKKYGGFDSPTVAYSVFVVADVEKGKAKKLKTVKELVGISIMERSFFEENPVEFLENKGYHNIREDKLIKLPKYSLFEFEGGRRRLLASASELQKGNEMVLPGYLVELLYHAHRADNFNSTEYLNYVSEHKKEFEKVLSCVEDFANLYVDVEKNLSKIRAVADSMDNFSIEEISNSFINLLTLTALGAPADFNFLGEKIPRKRYTSTKECLTATLIHQSITGLYETRIDLSKLGEE

SEQ ID NO: 220 - protein, 1044 aa, Nitrosomonas sp.
MLHKMRYRLALDLGSTSLGWAMVRLNANQQPCAVIKAGVRIFSNGRNPKDGSSLAVTRREARSMRRRRDRLLKRKARMMRTLIEYGFFPANETQRKALENLNPYALRAKGLDEALTPSEFARALFHINQRRGFKSNRKTDKKDSDSGALKTAIKQLHSVLDPQGNDGKPRTVGELLYKRFTDLSKLPKDRTVRARYRQDKIVKDDGKTKIDKYYDLYIDRAMIEQEFDALWKKQSELNPILFTENARADLKDVLLYQRSLKPVKPGRCTFMSEEERAPLALPSTQRFRMYQEVNNLRILREGLKEESLTLQQRDDLINALEKNNRRTFTQIKKLLGVGGSVQFNFEDPKREELKGNTTSAILGKSEHFGEAWFAFNEAKQDAIVLQLIKEENEAKLVRWLQDETGIDEKRAEVIANAGLPEGYGSLCIEALARILPELRRDVVTYDKAVQAAGFEHHSKLNRNEEIPDITFKIESIDRNSGEIKQFHLHKELPYYGEYLQRHVGFGSGKPEDSIEKRYGKIANPTVHIGLNQVRVVVNALIKRYGHPSEIIVEVARDLKQSKDRRDEENKRQAENQKRNERLRKDIADILGISEERVRRDDIEKMILWEELSFDPADRRCPYSGVQVSTVMLLSDEVEVEHILPFSQTLDDSLNNKTVALRQANRIKGNRTPWEAFGTSNISGFDYSGILTRAELMPKAKRYRFAEDGYQRWLKDDAGFLARALNDTRHLSKIAREYMSLICPNTRVIPGQMTAMLRRNFGLNDVLGLNGEKNRNDHRHHAVDACVIAVTDQGLLQRFAAASASARERQLNRLVENMPLPWESYREHVRRAIDGIWVSHRPDHSHEGAMHNDTAYGLRGNGRVSFHKMVEGKREYIEDNLKVIEITDTKAIDRHGLLPTGKPRPYKGYKGDSNYCIEIVRNEKGRWEGEIISTFDAYQLVRKYGIVQLRYPVLSVSGKPLVMRLIRNDFVRLEHEGITRTLRVCKMREDGQVALADVTEANVDARTRTKEICYVFKTGGSLQKAKARRITISPIGELRDPGFKE

SEQ ID NO: 221 - protein, 1045 aa, Acidovorax avenae
MQKEKPLAYRLALDLGSTSLGWAVLRLSAPGEPSAVIRAGSRIFSDGRNPKDGSSLAVTRRAARAMRRRRDRLLKRKARMLAALERHGFFPQDEAARKALEKLNPYGLRARGLESALKPEEFGRALFHLNQRRGFQSNRKTDRKDSDSGALKQAIGTLRAQMHESGCRTVGEWFWKVRMERKPEGVKGQGVRARYRETPFTTDEGKKRIDKRYDLYVDRAMVAQEFDALWAAQATFAPALFNEAARAELRDILLHQRKLRPVQPGRCTLVPEEPRALLALPSTQRFRIYQEVNHLRVLHDELREEALTLAQRDQIVALLERQAKVTFTAMRKALGFSALFNLEDAKRDGLKGNATTAALGKKDLFGPLWAGFDTALQDEIVTQLMTEESEPRLIAWLQEHTGVDEARAQAIANAGLPEGYGSLGRTALARIVPELQRDVITYDKAVQAAGFAHHSDLGFSFEHDADEVERIGERTIASTGEIKPVFAFKQLPYYGRALQRHVAFAKENPRNDEERYGKIANPTVHIGLNQVRVVVNALMCRYGRPTEVVIELARDLKQSREQKLEAQQRQADNQKRNARIRRSIAEVLGISEERVRTLDIQKWILWEELSHDAADRRCPYSGVQISASMLLGERVEIEHILPFSMTLDDSLNNRTVALREANRIKRNRTPWDARTDFEAHGWSYDGILQRAERMPQRKRHRFAPDGYERWLGEDKDFLARALNDTRYLSRVAAEYLRLVCPGSATRVIPGQMTALLRGKFGLNDVLGLDGEKNRNDHRHHAVDACVIGVTDQRMMQRFAQANAQAREDGLTRLVEDMPLPWPTYRAHVERAVRHIWVSHKPDHGFEGAMMEETSYGILRDGTIKQRRKADGSAGREISRLIRITEPSQPQRHGVDAEGRPLPYKGYVGGSNYCLEITVNDKGKWEGQVISTFDAYRIVREGGLRQLRHSTQGQNGQALAMRLVIGDSVRLEVDEQERVMRIVKINGNNGQVFMAPVHEANVDARNSDKNEAFAYTSKIAGSFQKTKARQVTISPIGELRDPGFKG

SEQ ID NO: 222 - protein, 1218 aa, Prevotella denticola
MKASEEKLSKGLSTYMKENNLLTVGAAFAQLEDEGVRIRNNNNYRAIRSQFQHEIETIFMFQQGLSENELYERLVSEKKNIGTIFYKRPLRSQRGNVGKCTLERTKPRCAIGHPLFEKFRAWTLINNIKIRMSEEEQAEQLPMKLRFELYNDCFLAFVRAEFKFEDIRKYLEKRLGVHFSYNDKTINYKDSTSVAGCPITARFRKLLGEDWESFHVDGQKQRQAHGKNNASFHTVSYSTNDIWHFCYDAEEPEAVLSFAQDNLKWEKKKAEELVRIWSAIPQGYAMLSQKAIRNINKMLILGLKYSDAVLLAKVPEIVEITDGEILSVTEDYHRVEAQVGYEKQINNIVNALIAKYKSASEEYRFADHNYEYQLDKSDEKDIIKQIESNIGTRKWSLLDADEQTDILQKVRDKYQNFFRSHERKFVESPKLGECFEEYLMKKFPMVEGEQWKKLYHPSQIAIYRPVSAGKDRSALRLGNPDIGAIKNPTVLRVLNTLRKRVNQLLDDGLISPDETRVVVETARELNDANRKWALDNYNRIRHDENEKIKKILEEFYPKRDGISTDDIDKARYVIDQREMDYFTEEKPYNKDIKKYKLWLEQGGQCMYTGRTINLSNLFDPNSFDVEHTIPESISFDSSDMNLTLCDAHYNRFIKKNHIPADLPNYDKSVVIDGKEYSPIKPRLQRWADRVERLNRNVEYWRGQARRAQNKDRKDQCMREMHLWKMELEYWTKKLERFTITEVTDEFKNSQLVDTRVITRHAVLYLKSIFPHVDVQRGDVTAKFRKILGIQSVDEKKDRSLHSHHAIDATTLTIIPGAAKRERMLELFAKIEEVNKMLSFSGNEDRTGLKQELDGLKNQLNKEVKACRIGHNVSEIGTFINDNIIINHHVKNQALTPVRRRLRKRGHIVGGMDNPRWQTGDALRGEIHKASYYGAITQFAKDKDGKVLLKEGHPLVDPTIKFVIRRELKYKKSTADSGFASWDDLEKAIVDKELFALMKGQFPEETSFKDACEQGIYMIKKGKNGEVDTKLYRIRHIRCKTKQKNALKIKEQAYKSEKEYKRYFYAAVGDLYAMCCYTNGKTREFKIYSLYDISCHRKVGVEDIPEFITDKKGNRLMLDYKLHTGDMILLYKENPEELYDLDNVSLSKLLYKINGFENDGLRIRMVNHLVAKEAMGESVKDYAKLPDIIRCGVKTIKFLVMGENRDFVIKNGKISFNHR

SEQ ID NO: 223 - protein, 1458 aa, Fluviicola taffensis
MTKTILGLDLGTNSIGWALINQDFDNKKGEILGMGSRIIPMTQDIKDEFGKGNSISQTAERTRLRGVRRLIHRTLLRRERLHRVLNIIGFLPEHYANQIDFEKRFGKFKPESEPKISFDGNDVFLFEKSYQEMLVDFKIHQPQLVSNGKKIPHDWTIYYLRKKALSKKIEKEELAWILLNFNQKRGYYQLRGEEEEETPNKLVEFHSLKIVEVNADEPQKGKPEIWYSLVLENGWVYRRASKTPLFDWKDKIREFIVTTEINNDGTVKTDKEGTEKRSFRAPKPEDWTLQKKKTEFELSKSGNEVGAFIYESILQKPNQKIRGKLISTIERKFYKEELKTILKTQLFFHKELKDEKLYNACIEELYKNNEAHRSLLSNKGFEHLFINDILFYQRPLRSKKSQISNCPLEKRTYKKEGIEITEGIKVISKSNPIYQEFRLWQWISNLSLYCIEPTETNVTSTFLNSIEDYENLFEFLNNRKEIEQKHLLKYLLENQGFKGKLLTNELEKFRWNFVADKKYPCNETGSLLHTRLSKVKNISPDFLTKEIEHQLWHIIYSVTDKIEYEQALKTFARKNNLDVDSFFEHFKKIPPFESTYGAYSEKAIKKLLPLIRLGKYWNWEAIDSISKDRISKILSGEYDENIKNRVREKAVHLTSENNFQGLQEWLAKYIVYDRHSEGNDLGKWTSVSDLETYLKEFKQHSLRNPIVEQVITETLRVVKDIWIKHGKGTENFFDEIHVELGREMKNNSEDRKRLTNTITENENTNLRIKALLMEMMNDNDVENVRPYSPSQQEILKIYEDGALNSNIELDDEIVKISKKAEPTKSELQRYKLWLEQKYRSPYTGQVIPLNKLFTSEYEIEHVVPQSRFFDDSFSNKVICESAVNKRKDNQLGLQFIKNHSGEKVELGFGKVVQVFTEEQYLDFVKEHYSKNRSKHNKLLLEEIPEKMIERQLNDTRYISKFVSSILSNIVRSEKDDDGLNSKNILPGNGKITTELKRDWGLNDVWNDLILPRFERMNTITNSDLFTTYNDKYQKHLPTVPFEYSKGFQKKRIDHRHHAMDALVIACATRDHLNLMNNQSAKSELKRYDLQNKLRKKEPYFNQKENKQKEAFKDFIKPWGTFTEDSKNALEKIIISFKQNLRVINKATNSYESYKDEDGNLRIGKDGKPEKGLIKQKGLNWAIRKPLHKDTVSGQINLSRIKLPNGKILTATRKNLDTSFDLKTIENSITDTGIQKILKNYLLSKESPELAFSPEGLEEMNNEIEKYNNGKFHHPINKARIYELGSKFNVGQTGNRRDKFVEAAKGTNLFFAIYQDENKNRSYETIPLNEVIEHQKWRASLPKEEQEKIPLVPVNKLKGTFIFSLSPNDLVYVPSNDELERSASIDFSKLKKEQINRLYKMVSSSGSQCFFVKSEVATSVVNKMEYSSLNKMEKSIDNLMVKEICIKLKIDRLGNISKA

SEQ ID NO: 224 - protein, 1384 aa, Coriobacterium glomerans
MKLRGIEDDYSIGLDMGTSSVGWAVTDERGTLAHFKRKPTWGSRLFREAQTAAVARMPRGQRRRYVRRRWRLDLLQKLFEQQMEQADPDFFIRLRQSRLLRDDRAEEHADYRWPLFNDCKFTERDYYQRFPTIYHVRSWLMETDEQADIRLIYLALHNIVKHRGNFLREGQSLSAKSARPDEALNHLRETLRVWSSERGFECSIADNGSILAMLTHPDLSPSDRRKKIAPLFDVKSDDAAADKKLGIALAGAVIGLKTEFKNIFGDFPCEDSSIYLSNDEAVDAVRSACPDDCAELFDRLCEVYSAYVLQGLLSYAPGQTISANMVEKYRRYGEDLALLKKLVKIYAPDQYRMFFSGATYPGTGIYDAAQARGYTKYNLGPKKSEYKPSESMQYDDFRKAVEKLFAKTDARADERYRMMMDRFDKQQFLRRLKTSDNGSIYHQLHLEELKAIVENQGRFYPFLKRDADKLVSLVSFRIPYYVGPLSTRNARTDQHGENRFAWSERKPGMQDEPIFPWNWESIIDRSKSAEKFILRMTGMCTYLQQEPVLPKSSLLYEEFCVLNELNGAHWSIDGDDEHRFDAADREGIIEELFRRKRTVSYGDVAGWMERERNQIGAHVCGGQGEKGFESKLGSYIFFCKDVFKVERLEQSDYPMIERIILWNTLFEDRKILSQRLKEEYGSRLSAEQIKTICKKRFTGWGRLSEKFLTGITVQVDEDSVSIMDVLREGCPVSGKRGRAMVMMEILRDEELGFQKKVDDFNRAFFAENAQALGVNELPGSPAVRRSLNQSIRIVDEIASIAGKAPANIFIEVTRDEDPKKKGRRTKRRYNDLKDALEAFKKEDPELWRELCETAPNDMDERLSLYFMQRGKCLYSGRAIDIHQLSNAGIYEVDHIIPRTYVKDDSLENKALVYREENQRKTDMLLIDPEIRRRMSGYWRMLHEAKLIGDKKFRNLLRSRIDDKALKGFIARQLVETGQMVKLVRSLLEARYPETNIISVKASISHDLRTAAELVKCREANDFHHAHDAFLACRVGLFIQKRHPCVYENPIGLSQVVRNYVRQQADIFKRCRTIPGSSGFIVNSFMTSGFDKETGEIFKDDWDAEAEVEGIRRSLNFRQCFISRMPFEDHGVFWDATIYSPRAKKTAALPLKQGLNPSRYGSFSREQFAYFFIYKARNPRKEQTLFEFAQVPVRLSAQIRQDENALERYARELAKDQGLEFIRIERSKILKNQLIEIDGDRLCITGKEEVRNACELAFAQDEMRVIRMLVSEKPVSRECVISLFNRILLHGDQASRRLSKQLKLALLSEAFSEASDNVQRNVVLGLIAIFNGSTNMVNLSDIGGSKFAGNVRIKYKKELASPKVNVHLIDQSVTGMFERRTKIGL

SEQ ID NO: 225 - protein, 1077 aa, Neisseria bacilliformis
MQQKPQRYILGLDLGIASVGWACVWADENEHPTGLLDCGVRTFERAEVPKTGDSLALARRQARSVRRLIRRRAHRLLRLRRLLKREGVLLSADFNENGLVRGLPIDAWALRVAGLDRKLSNKEWAAVLLHLVKHRGYLSQRKNETQSKDKELGRLLAGVNGNREALQNRSDEYRTAAELAVKKFAAENNGSLRNKGGDYSHTFDRKDLQRELHLLFERQRALDNPFTSSEMEAAVDELLMKQRSALQGEAVLKMLGRCTFEPSEYKAAKNTYSAERFVWLTKLNNLRIQYNGEERALSEAERRLLLDEPYQKAKLTYKQVRTILELPESAVFKGLRYGHGEDGLKAESGTLMEMKAYHAVRKALKDAGLEGEWENRIRNPELLDAIGTAFSLYKTDEDIRANLAAFRLSENVLEALLAGLNFDKFVHLSLKALAKILPLMEQGMRYDEACKEAYGDHYGAKEQEDHRLLPPFVADDIRNPVVFRTLTQARKIVNEIVRRYGSPLRVHIETGREVGKSFSDRKEIEKRQEENRKERERAAAHFKELFPNFAGEPKAQDILKLRLYEQQHGKCLYSGKEIDLRRLPEKGYVEIDHALPFSRTWDDSFNNKVLVLGKENQDKRNRTPYEYLDGKGNSGAWRAFAERVSGCRFPYAKKQRLLTQKLDEKTEQGFLERNLNDTRYVARFLCQFIEEKMHLEGAGKKRVFASNGQITALLRGFWGLKKVREENDRHHALDAVVVACSSVSMQQKITRHFRYREELEHIDRETGEVIHGFPQPWEFFRQEVMTRVFSDDPVSELAEKLDSRPEAVHEFVTPLFVSRAPHRKVTGQGHLETIRSAKRLDEKISVVKLPLTQLKTKDIERIVGYPNREPALYDALAARLAAFKDDPAKAFSEPFYKTGKDGKCGVLVKAVRVENVQKSGLLVRKDESGKMQGVADNATMVRVDVFGKNGKNYLVPVYAWQVEKGELPNRAVVAYADEEDWDEMDDSFEFKFSLYPNDLVEVVTKKDKFFGYYSGFNRATGAINIKEHDLSKSKVKNGVYEGIGVKTAQSFQKYQVDTLGKTIRLCKPEKRMGFKKK

SEQ ID NO: 226 - protein, 1029 aa, Alicycliphilus denitrificans; identical to SEQ ID NO: 203

SEQ ID NO: 227 - protein, 1122 aa, Streptococcus suis; identical to SEQ ID NO: 97

SEQ ID NO: 228 - protein, 1428 aa, Parasutterella excrementihominis
MGKTHIIGVGLDLGGTYTGTFITSHPSDEAEHRDHSSAFTVVNSEKLSFSSKSRTAVRHRVRSYKGFDLRRRLLLLVAEYQLLQKKQTLAPEERENLRIALSGYLKRRGYARTEAETDTSVLESLDPSVFSSAPSFTNFFNDSEPLNIQWEAIANSPETTKALNKELSGQKEADFKKYIKTSFPEYSAKEILANYVEGRRAILDASKYIANLQSLGHKHRSKYLSDILQDMKRDSRITRLSEAFGSTDNLWRIIGNISNLQERAVRWYFNDAKFEQGQEQLDAVKLKNVLVRALKYLRSDDKEWSASQKQIIQSLEQSGDVLDVLAGLDPDRTIPPYEDQNNRRPPEDQTLYLNPKALSSEYGEKWKSWANKFAGAYPLLTEDLTEILKNTDRKSRIKIRSDVLPDSDYRLAYILQRAFDRSIALDECSIRRTAEDFENGVVIKNEKLEDVLSGHQLEEFLEFANRYYQETAKAKNGLWFPENALLERADLHPPMKNKILNVIVGQALGVSPAEGTDFIEEIWNSKVKGRSTVRSICNAIENERKTYGPYFSEDYKFVKTALKEGKTEKELSKKFAAVIKVLKMVSEVVPFIGKELRLSDEAQSKFDNLYSLAQLYNLIETERNGFSKVSLAAHLENAWRMTMTDGSAQCCRLPADCVRPFDGFIRKAIDRNSWEVAKRIAEEVKKSVDFTNGTVKIPVAIEANSFNFTASLTDLKYIQLKEQKLKKKLEDIQRNEENQEKRWLSKEERIRADSHGICAYTGRPLDDVGEIDHIIPRSLTLKKSESIYNSEVNLIFVSAQGNQEKKNNIYLLSNLAKNYLAAVFGTSDLSQITNEIESTVLQLKAAGRLGYFDLLSEKERACARHALFLNSDSEARRAVIDVLGSRRKASVNGTQAWFVRSIFSKVRQALAAWTQETGNELIFDAISVPAADSSEMRKRFAEYRPEFRKPKVQPVASHSIDAMCIYLAACSDPFKTKRMGSQLAIYEPINFDNLFTGSCQVIQNTPRNFSDKTNIANSPIFKETIYAERFLDIIVSRGEIFIGYPSNMPFEEKPNRISIGGKDPFSILSVLGAYLDKAPSSEKEKLTIYRVVKNKAFELFSKVAGSKFTAEEDKAAKILEALHFVTVKQDVAATVSDLIKSKKELSKDSIENLAKQKGCLKKVEYSSKEFKFKGSLIIPAAVEWGKVLWNVFKENTAEELKDENALRKALEAAWPSSFGTRNLHSKAKRVFSLPVVATQSGAVRIRRKTAFGDFVYQSQDTNNLYSSFPVKNGKLDWSSPIIHPALQNRNLTAYGYRFVDHDRSISMSEFREVYNKDDLMRIELAQGTSSRRYLRVEMPGEKFLAWFGENSISLGSSFKFSVSEVFDNKIYTENAEFTKFLPKPREDNKHNGTIFFELVGPRVIFNYIVGGAASSLKEIFSEAGKERS

SEQ ID NO: 229 - protein, 1371 aa, Lactobacillus buchneri
MKVNNYHIGLDIGTSSIGWVAIGEDGKPLRIKGKTAIGARLFQEGNPAADRRMFRTTRRRLSRRKWRLKLLEEIFDPYITPVDSTFFARLKQSNLSPKDSRKEFKGSMLFPDLTDMQYHKDYPTIYHLRHALMTQDEKFDIRMVYLAIHHIVKYRGNFLNSTPVDSFKASKVNFVDQFKKLNELYTAINPEESFQINLANSEDIGHQFLDPSIRKFDKKKQIPKIVPVSVDDKATDKINGKIASEIINAILGYKSKLDVVVQCTPVDSKSWALKFDEEDIDAKLQKILPEMDENQQSIIAILQNLYSQVTLNQIVPNGMSLSESMIEKYNDHHDHLKLYKKIIDQLADPKKKAALKKAYSQYVGDDGKVIEQADFWSSVKKNLDDSDLSKQIMDLIDAEKFMPKQRTSQNGVIPHQLHQRELDEIIEHQSKYYPWLAEINPNKHDLHLAKYKIEELVAFRVPYYVGPMITPDDQAKSAETVFSWMERKGKEAGQITPWNFDEKVDRNASANRFIKRMTTKDTYLIGEDVLPDESLLYEKFKVLNELNMVRVNGKLLKVADKQAIFQDLFENYKHISVKKLQNYIKSKTGLPSDPEISGLSDPEYFNNSLGTYNDFKKLFGNKVDEPDLQDDFEKIVEWSTVFEDKRILREKLNEITWLSDQQKDVLESSRYQGWGRLSKKLLTGIVNDQGERIIDELWNTNKNFMQIQSDNDFAKRIHEANADQMKAVDVEDVLADAYTSPQNKKAIRQVVKVVDDIQKAMGGVAPKYISIEFTRSEDRNPRRTISRQRQLENTLKDTAKSLAKSINPELLSELDNAAKSKKGLTDRLYLYFTQLGKDIYTGKPINIDEISTYDIDHILPQAFVKDDSLNNRVLVSKAINNGKSDNVPVQLFGAKMGHFWKQLAEAGLISKRKLKNLQTDPDTISKYAMHGFIRRQLVETSQVIKLVANILGDKYRNDNTKIIEITARMNHQMRDEFGFIKNREINDYHHAFDAYLTAFLGRYLYHRYIKLRPYFVYGDFKKFKEDKVTMRNFNFLHDLTDDTQEKIADAETGEVIWDRENSIQQLKDVYHYKFMLISHEVYTLRGAMFNQTVYPASDAGKRKLIPIKADRPINVYGGYSGSADAYMAIVRIHNKKGDKYRVVGVPMRARDRLDAAKKVSDADCDRALKDVLTPQLTKTKKSRKTGEITQVVEDFEIVLGKVMYRQLMIDGDKKFMLGSSTYQYNAKQLVLSDQSVKTLASKGRLDPLQESMDYNNVYTEILDKVNQYFSLYDMNKFRHKLNLGFSKFISFPNHNVFDGNTKASSGKREILEEVLNGLHANPTFGNLKDIGITTPFGQLQQPNGILLSDEAKIRYQSPTGLFERTVSLKDL

SEQ ID NO: 230 - protein, 1090 aa, Sphingomonas sp.
MDWRLGLDLGANSLGWAALRLDRAGDPIGILAMGSRIFSDGRDPKSGASLAVDRRAARAMRRRRDRFKQRQAALLKYLIRDGLFPADQADRQRLADEDPYALRARALDEELSLFEIGRALFHLNQRRGFQSNRKADRGQDDEAGKIAVGVDRLNQQMEEQGARTLGEFLHQRRRAATDANHIPSVRTRLRPETGEGAKGDGYDFYPSRALIAEEFEEIWAAQAPHYPDTLTQQVHDRLYEIIFHQRPLRAPQVGQCTLVAGETRLPKAHPLFQKRRLLEEINALMIVRPGEIAQRLTPEERDTLYLKLKDKRTVSFATLRKTLKLDSAARFNKESENRTELKGDEVAAELGAKTRLGTRWQHLSGDQQWEVVHRLMALESQADEAAFRDWISQTYDLLPEQAAAVLGARLPQGHGRFGPTATTTLIDSLLHDRTEDGRVVVYSEAVQRSGLGHHSDLRHDRDDEDVTELPYYGVALERHIMPGTAEPTDPEEMRIGRLTNPTVHIGLNQLRHVVNRLIRAYGPPKEIAIELARELKLSEDEKKKRNSENRDNRLAAEGRSKKLEEIRQRDTGANRALLKLWEELNPGNVLDRRCIYTGEQISIDMLFSDRVEVDHILPFAQTLDDSNGNKLLCLREANREKRRRSPYEAWGHTDRWPDIAERASRLPKPKRWRFEPDAMQRFATEDGFLARHLVDTQYLGRLAREYLSWLYPGRGEGSGHVWVSPGRLTEMVRRKLGLNDLLPDHNFGGGADQPKNRLDHRHHAIDALVVAIVDRGMLQAIARASGQDGSEGRERIHIPAPWDGFRDDLRVAVNGIIVSHRPDHGTVAKAGLARGRDQTAGRLHNDTAYGLTGETDAKGNSIVVRRIPLSAIKKPADIARVRDPLLRNALAEFTKGLDGKAFEARIGRFHELGPLLYRGIRRVRVVETLTVIPIRDAEGRAYKGYKGDSNYRYDVWEMPDGKWRCQVVSMFDAHQSTEQARPHPAARKILSLQRNDILAIERTEGDRELVRVVKFSEKQFAVAPPHEGGSLKTRDGNADDPFRYLYPSPNTLKGWRARQVRIDELGRVLDPGFPARKSVRRTRPRAAPVD

SEQ ID NO: 231 - protein, 1000 aa, Kingella kingae
MARAQRRLISRRANRMNKLRRLLKQENVLQANDYDEKGLIIGLPNQAWELRAQGLDRKLEPKEWAAVLINLVKHRGYLSQRKNESQTADKELGALLSGMNHNHQLLQSQSNQYRTPAELAIKQFATQDGHIRNQRGAYTHTFNRLDLQNELNQLFDAQTRLGNPHVSGSLKTAINDLLMNQKAALSGDAILEMLGRCTFEPSEYKAAKNTYSAERFVWLGKLTNLRIQDNGLESALSREQRELLLNEPYNKTKLTYQQVRKLLRLPETAFFKGLRYGKDNAESATFMEMKSYHAIRKSLENKSLKSEWEKLKTQPKLLDLIGTAFSIYKTDDEIAGCLKNQLPENVIIALQEQLNFSNFMELSLKALEKLLPLMEQGLRYDEACTQIYGNRHEKIADKTEKFLPNIPADKLRNPVVLRTLTQARKVINAIIRRYGSPARVHIETGREVGKSFSDRDKLKKQQEENQEQRRRAIDEWKQFFPNAAHEPKAVDILKLRLYQLQQGKCLYSGLPIDVRRLPEKGYVEIDHALPFSRTWDDSFNNKILVLASENQNKGNQTPYEYLRGADNSESWRLFVENVQNCQFSPNKKQKIMAKQLDEKGFLERNLNDTRYVSRFLCQFISEHLHLTGKGKKRVFASNGQITALLRGRWGLSKNREENDRHHAVDAVVVACSTVAMQQKITQFVRYQKGNVFTGERIDKETGEVISIHFPTPWEHFREEVMIRVFDDNPLRTLPEKLPNRPEALHEYVMPLFVSRMPTRKMTGQGHKETIKSAKRLDEKISVLRVPLTQLKLNDLENMVNREREPALYEALKARLEQFKNDPAKAFAEPFFKQGGQQVKAVRVEIVQKSGMLLRKINGVADNGSMVRVDVFEKSGKFYLVPIYAWQVAEGILPNYAVVAHKDESDWILMDESYHFKFALYKNDLLEVQTKKGGIMGYFASLDRATGAITIREHDRDKKKCKDGEHRSIGVKMASSFKKLQVDELGKNIHETRSRKRPNIG

SEQ ID NO: 232 - protein, 1130 aa, Streptococcus pasteurianus
MTNGKILGLDIGIASVGVGIIEAKTGKVVHANSRLFSAANAENNAERRGFRGSRRLNRRKKHRVKRVRDLFEKYGIVTDFRNLNLNPYELRVKGLTEQLKNEELFAALRTISKRRGISYLDDAEDDSTGSTDYAKSIDENRRLLKNKTPGQIQLERLEKYGQLRGNFTVYDENGEAHRLINVFSTSDYEKEARKILETQADYNKKITAEFIDDYVEILTQKRKYYHGPGNEKSRTDYGRFRTDGTTLENIFGILIGKCNFYPDEYRASKASYTAQEYNFLNDLNNLKVSTETGKLSTEQKESLVEFAKNTATLGPAKLLKEIAKILDCKVDEIKGYREDDKGKPDLHTFEPYRKLKFNLESINIDDLSREVIDKLADILTLNTEREGIEDAIKRNLPNQFTEEQISEIIKVRKSQSTAFNKGWHSFSAKLMNELIPELYATSDEQMTILTRLEKFKVNKKSSKNTKTIDEKEVTDEIYNPVVAKSVRQTIKIINAAVKKYGDFDKIVIEMPRDKNADDEKKFIDKRNKENKKEKDDALKRAAYLYNSSDKLPDEVFHGNKQLETKIRLWYQQGERCLYSGKPISIQELVHNSNNFEIDHILPLSLSFDDSLANKVLVYAWTNQEKGQKTPYQVIDSMDAAWSFREMKDYVLKQKGLGKKKRDYLLTTENIDKIEVKKKFIERNLVDTRYASRVVLNSLQSALRELGKDTKVSVVRGQFTSQLRRKWKIDKSRETYHHHAVDALIIAASSQLKLWEKQDNPMFVDYGKNQVVDKQTGEILSVSDDEYKELVFQPPYQGFVNTISSKGFEDEILFSYQVDSKYNRKVSDATIYSTRKAKIGKDKKEETYVLGKIKDIYSQNGFDTFIKKYNKDKTQFLMYQKDSLTWENVIEVILRDYPTTKKSEDGKNDVKCNPFEEYRRENGLICKYSKKGKGTPIKSLKYYDKKLGNCIDITPEESRNKVILQSINPWRADVYFNPETLKYELMGLKYSDLSFEKGTGNYHISQEKYDAIKEKEGIGKKSEFKFTLYRNDLILIKDIASGEQEIYRFLSRTMPNVNHYVELKPYDKEKFDNVQELVEALGEADKVGRCIKGLNKPNISIYKVRTDVLGNKYFVKKKGDKPKLDFKNNKK

SEQ ID NO: 233 - protein, 1119 aa, Lactobacillus coryniformis
MGYRIGLDVGITSTGYAVLKTDKNGLPYKILTLDSVIYPRAENPQTGASLAEPRRIKRGLRRRTRRTKFRKQRTQQLFIHSGLLSKPEIEQILATPQAKYSVYELRVAGLDRRLTNSELFRVLYFFIGHRGFKSNRKAELNPENEADKKQMGQLLNSIEEIRKAIAEKGYRTVGELYLKDPKYNDHKRNKGYIDGYLSTPNRQMLVDEIKQILDKQRELGNEKLTDEFYATYLLGDENRAGIFQAQRDFDEGPGAGPYAGDQIKKMVGKDIFEPTEDRAAKATYTFQYFNLLQKMTSLNYQNTTGDTWHTLNGLDRQAIIDAVFAKAEKPTKTYKPTDFGELRKLLKLPDDARFNLVNYGSLQTQKEIETVEKKTRFVDFKAYHDLVKVLPEEMWQSRQLLDHIGTALTLYSSDKRRRRYFAEELNLPAELIEKLLPLNFSKFGHLSIKSMQNIIPYLEMGQVYSEATTNTGYDFRKKQISKDTIREEITNPVVRRAVTKTIKIVEQIIRRYGKPDGINIELARELGRNFKERGDIQKRQDKNRQTNDKIAAELTELGIPVNGQNIIRYKLHKEQNGVDPYTGDQIPFERAFSEGYEVDHIIPYSISWDDSYTNKVLTSAKCNREKGNRIPMVYLANNEQRLNALTNIADNIIRNSRKRQKLLKQKLSDEELKDWKQRNINDTRFITRVLYNYFRQAIEFNPELEKKQRVLPLNGEVTSKIRSRWGFLKVREDGDLHHAIDATVIAAITPKFIQQVTKYSQHQEVKNNQALWHDAEIKDAEYAAEAQRMDADLFNKIFNGFPLPWPEFLDELLARISDNPVEMMKSRSWNTYTPIEIAKLKPVFVVRLANHKISGPAHLDTIRSAKLFDEKGIVLSRVSITKLKINKKGQVATGDGIYDPENSNNGDKVVYSAIRQALEAHNGSGELAFPDGYLEYVDHGTKKLVRKVRVAKKVSLPVRLKNKAAADNGSMVRIDVFNTGKKFVFVPIYIKDTVEQVLPNKAIARGKSLWYQITESDQFCFSLYPGDMVHIESKTGIKPKYSNKENNTSVVPIKNFYGYFDGADIATASILVRAHDSSYTARSIGIAGLLKFEKYQVDYFGRYHKVHEKKRQLFVKRDE

SEQ ID NO: 234 - protein, 1126 aa, Lactobacillus farciminis
MADRISLGLDIGVASVGFSVLDIDKGKVIELGARLFSATVAAGNQDRRDMRGARRLLNRNKQRRQDTGKLFKKFGLIDDFDKGSFYDNFNQNLNPYELRVKGLTEQLTKEELAESLYQIVKHRGISYALKDADVDEGGTDYSVSLKINSQELAEKTPAQIQLQRLNDYGKVRGQVVIGDDPDNQKVLLNVFPTSAYEKEAKQIIATQQQFYPESLTDKFTEEYCQILTRKRDYFVGPGNEKSRTDYGIYKTDGRTLDNLFEELIGHDKIYPEELRASAASYTAQLFNVLNDLNNLRILNYEDGKLTKEDKEKIIAEIKNNTTTINMLNVIKKVAGCSKDDIKGFRVNEKDKPEISSMPVYRKIHKDLLKAGVDISDWPVEFIDELSFILTLNTENGEIRKQLNNRLAPKFDFLNADLIQLIIDNKDSFEIKTNNKWHRFSVKTMNKLIPEMMERPVEQMTLLNEMGLVKKDKKRFENNKYLPYKEIAKDIFNPVASKSVREALKIVNAVLKKYGHIDYLVVEMPRDKNLKEEQDNIKEFQNKNKKAKDAAFEAFVKSVGSEQRVKEALSKNRKLQMKMRLWYQQQEIDPYNGKTIDATDLINNPDKFEIDHIIPQSISFYDSINNKTLCFASMNQVKGQKTPYEFMLEGHGQSYDKFKATVMANKNFGKAKRANYLFEENVSDIETRKRFLSRNLVDTRYSSRVVLNSLQDFFREKSADTKVTVIRGKFTSNMRKHWHIDKTRETFHHHAIDASIIAATPFLRMWKKGGTIFPVKVGEESIDIETGEILDDKNFDKAMYEEPYSGFVSEIMNADDRIKFSHQVDKKMNRKVSDATIYSTRTGKLAKDKKDAEYIVAKVKDIYSVDGFKKFKKVYDKDKTKFLLYKYDPRTFSKLERIISDCPDKVEKVQTNGKVKAVDISPFEMYRRDHGMIKKYSKKGNGPAIKQLKYLDKKLGSHIDITPANANGKHVILQSLKPWRTDVYLNHETGEYEIMGIKYSDLKFNKNEGYGIKKDKYLEIKKVEEVSEKSEFMFSLYRKDRVKVQDMKTGESVELLFWSRNFSNKKYAELKPISQAENDKKLPVYGKGRLIKRLIPKNCKIWKVNTTILGDPYYLEKESDSPKDILD

SEQ ID NO: 235 - protein, 1380 aa, Eggerthella sp.
MNLRHVGNYNIGLDMGTASVGWAAIDEQGELLHFKGKPTWGSRLFDSANTAATARMPRGQRRRYIRRRWRLDLLQKFFSEEMAEKDPEFFIRLRQSSLWPEDREGGHTAYHWPLFNDSDFNEKEYYEKFPTIFHLRQWLMETDEKADIRLIYLAFHNIVKHRGNFLQENNDSLSAQNANMRESLESFCIALEEWCDEKELTCSCDPQKLEHLFKEVKYRSDIRDGFAALLGLACSGENEVDVKAMAKEMGKAIVGYKADFSKIFTECDKEGSSFRLSDDEGPEAFLDICPDDGIALFEAIQMVYSSFILTGMLTEKGLSLSKISAYNQYGQDLESLKALVKEYVPNEYSSFFRGPTYSGSTEYDPSKAQGYTRYNLGPSKKGSGAKPMAYEDFKKSVEQLFANTNAINDERYKEMMGRFAEEKFLRRLRTSDNGRIPFQLNLEEMTAIIINQGKYYPFLLEQQEKLESLVRFRIPYYVGPLTRINARLDSKGNACFAWSKRKDGMDSASIKPWNWDEVIDKHASAQAFIERMTGTCTYLRGEPVLPRCSLLYEEYCVLNELNGARWTQDGDKFIRFDYKDRSDIIEELFKKRRGRIQYAAVADWMKQERSHANVHVSGGQGENAFESRLSSYHFFCNDVFGVDELPGSYVDMVEEIILWSTLFEDRSILREEIQRKYGDVLNEEQIKTICKKRFSGWGRLSRKLLCSLKAQTDNGPKSIMDILQEGDQNNGRVGRAMVFQEILHDEQLGFEQKIEEENTQSMLEGENLLIEDLPGSPAIRRSINQAVRIVDEIVGIAGHAPDNIFIEVTREDDTKKKGKRTTTRYSNIQKALEALKEEGAEALRELKTYKHNELDKRLSLYFMQNGKSLYSGIPLDIRRLSEYQIDHIIPQSYIKDDSYENMALVLPGENQSKADNLLISQDIRIKMKATWTALHKAGLMGDKKYNNLMNSSISDAKMKGFINRQLVETSQSVKLTQMMLSQKYPGAKVRPIKASISSQLRDACDLVKCREANDYHHAHDAYLACQVGRFVLKRHSSMFDNPIGMTKVIRDFVKRQGQEFKRNGKLPAYASRSGFIVQSFMRSGFDAETGELLRDDWNAPFEIARIKRCLNYRDCYISRMPMEDSGAFWDATIYSPKAGKKGALPVKQGLPVEKYGSYSREQFAYFFVYKAYNPKKKAYRLEFEAVPVRVASAVETRENALEEYAKSVAKQAGLEFVEVARPKVYKYQLIELGEDRLYITGKREVRNASQLAFSLDEIDLLKRLAEGEETSSEERERLFDVLIEKYARYAPRLARQLSVDSMSATFETLNAEEQLGILLSLVEIANGKRNMIDLSSAGGSKNAGCMNPTFSSELSSPGSNFTFIDQSVTGMFERRQRLEL

SEQ ID NO: 236 - protein, 1430 aa, Capnocytophaga canimorsus
MKHILGLDLGTNSIGWAVVKEAQNDNEQSEIVDVGVRVNPLTTDEKTNFEKGKPISTNADRTLKRSARRNLQRYKLRRKELIELLKEHQLISTDTILTENGKGTTFQTLELRAKSAKEKISLEELARVFLTINKKRGYKSSRKAKNEDEGQLIDGMEIAKRLYEENLTTGQLSLQLLKEGKKSLPDYYRSDLQFELDKVWNFQKQFHSHILTDEFYAQLKGKGQRATSALFLAKYQIYTAENKGSREDKKLQAYQWRVDALSKELTREQLAFVITEINNNLNNSSGYLGAISDRSKELYFNNETVGEYLWKQIAANPHTSLKNQVFYRQDYLDEFEQIWKTQSAFYPEILTDELKKELRDVVIFYQRKLKSQKSLVSFCEFENKEIEIKKEDGTSTKKVIGLKVAPKSSPLFQEFKIWQNLNNVLIRKKGSKTKKVDKNQQAVLFEEEKTIFELDLEAKQALFNELNLKGNLKAYYCLEILGYSPKEWEMNYSVLEGNRTNKALYEAYLKITDLEGYDAKNHLKVKLNKDEVELDDLKVPASEIKDMVQAIFKEAGINTDILHFNAELDGKDFENQASYQLWHLLYSYEGDDSKSGNELLYKLLETKFGFKKEYAQILANVSLSDDYGSLSTKAMRKIHPYIKENKFSTACELAGYRHSKHSLTKEENDNRVLKDSLEVLKKNSLRQPVVEKILNQMINLVNALLKKYRTENPNFKFDEIRIELARELKKNAEERANMTVNINKAKTEHEKIIKILKNEFGLPNPTRNDIIRYRLYEELKANGYKDLYTNEYIEKQDLFTKNIDIEHIIPKSRVFDDSFSNKTLSFRKTNLDKGERTAFDYIESKFGADKLEEYVARVEDLYKNNIISKAKYQKLLKKESEIGDGFVERDLRETQYIAKKAKEILLQITPNVLSTSGGITDRLREDWDLINVMKELNLPKYRALGLTQMEDRKYGQQVEVIIDWTKRNDHRHHAMDALTVAFTKHNHIQYLNYLNARKNEKHREHSNIMGIQQLETIKVTDKNGNEKRVFKAPMPNFRQVTKAFLENVLISHKAKNKVVTKNKNKVAGSNKVQEVLTPRGQLHKETVYGKYQYYVQKEEKIGGKFDLETIKKVANPLYQSLLKKRLEENGGDPKKAFTGKNSLAKNPIYLDDAQTEQLPEKVKLVWLENSFSIRKDITPENFKDEKLIDKILDEGVKRILKERLQSFGNDAKKAFSDLDKNPIWLNKEKGIAIKRVAISGVANAEPLHTKKDHLGKEILDKEGKSIPVDFISTGNNHHVAVYRDEKGNLQEKVVSVFEAVVRANQGLPIIDKTYNQHLGWEFLFTMKQNEMFVFSNESTGFNPNDIDLLDPKNKKIISPNLFRVQKFSKLQYGNSFVREFVFRHHLETTVEDRKELQGITYKQMKNSAFFNDIIKVRINHLGGIVSVGEY

SEQ ID NO: 237 - protein, 1348 aa, Finegoldia magna
MKSEKKYYIGLDVGTNSVGWAVTDEFYNILRAKGKDLWGVRLFEKAKTAADTRTFRSGRRRNDRKGVRLQILREIFEDEIKKVDKDFYDRLDESKFWAEDKKVSGKYSLFNDKNFSDKQYFEKFPTIFHLRKYLMEEHGKVDIRYYFLAINQMMKRRGHFLIDGQISHVTDDKPLKQQLILLINDLLKIELEEEFMDSIFEILADVNEKKTEKKNILKELINAQDFNKQEGKILYSIFESIVTGKAKIKNIISDEDILEKIKEDNKEDFVLTGDSYEENLQYFEEVLQENITLFNTLKSAYDFVILQSILKGKSTLSDAQVERYDEHKKDLEILKKVIKKYDEDGKLFKQVFKEDNGNGYVSYIGYYLNKNKKITAKKKISNIEFTKYVKGILEKQCDCEDEDVKYLLGKIEQENFLLKQISSINSVIPHQIHLFELDKILENLAKYYPSFNNKKEEFTKIEKIRKTFTFRIPYYVGPLNDYHKNNGGNAWIFRNKGEKIRPWNFEKIVDLHKSEEEFIKRMLNQCTYLPEETVLPKSSILYSEYMVLNELNNLRINGKPIDTDVKLKLIEELFKKKTKVTLKSIRDYMIRNNFADKEDFDNSEKNLEIVSNMKSYIDFNNILGDKFELEMVEDLIEKITIHTGNKKLLKKYIEETYPDLSSSQIQKIINLKYKDWGRLSRKLLDGITGTNIETGEIDTVINFLRNSSDNLMQIIGSQNYSFNNDIDKLRKKYIPQEISYEVVENLYVSPSVKKMIWQVIRITEEITKVMGYDPDKIFIEMAKSEEGKKTTISRKNKLLALYKAIKKDERDSQYEKLLTGLNKLDDSDLRSRKLYLYYTQMGRDMYTGEKIDLDKLFDSTHYDKDHIIPQSMKKDDSIINNLVLVNKNANQTTKGNIYPVPSSIRNNPKIYNYWKYLMEKEFISKEKYNRLIRNTPLTNEELGGFINRQLVETRQSTKAIKELFEKFYKKSKIIPVKAILASDLRKDMNTLKSREVNDLHHAHDAFLNIVAGDVWNREFTSNPINYVKENREGDKVKYSLSKYFTRPRKSKGKVIWTPEKGRKLIVDTLNKPSVLISNESHVKKGELFNATIAGKKDYKKGKIYLPLKKDDRLQDVSKYGGYKAINGAFFFLVEHTKSKKRIRSIELFPLHLLSKFYEDKNTVLDYAINVLQLQDPKIIIDKINYRTEIIIDNFSYLISTKSNDGSITVKPNEQMYWRVDEISNLKKIENKYKKDAILTEEDRKIMESYIDKIYQQFKAGKYKNRRTTDTIIEKYEIIDLDTLDNKQLYQLLVAFISLSYKTSNNAVDFTVIGLGTECGKPRITNLPDNTYLVYKSITGIYEKRIRIK

SEQ ID NO: 238 - protein, 1352 aa, Megasphaera sp.
MKKRNREEYYVGLDIGTSSVGWAVATPDYRIPKFRGHKMWGSRLFAEGKRAAERRQFRTNRRRLARRRDRLQILEELFAEEMAKVDNTFFMRLKESKFFLEDKTVKEKHILFSTDKFDADRFYKDNPTIYHVRKRLMEEEPQDIRELFLAVHHILKYRGHFLFAGSLEQNGASIEELVRTLLGKQGLAILDDTIDSNEMVNILKNTGETKSDRKKDVQELWNPLKDKVKKAQAAEMAGLVLGLKSDISKLFANSDYKDLDSSIKNINFSSGDYEEKRDDYANSIGDDIVLLDTMKALYDTLILSQILQGKRSISAAKVEDYNTHKEQLRALKAILKPHKRLYNEMFRENNKKDLSNYVAYISSYSEGKRVNREGFYKYVQAVLKQVDDSDSKQAILEAIRLETFLPLLRVKDNAVIPHQIHQAELEAILETARKKYNFLNDVSDGVSVKDKIIQLFTFRIPYYVGPLNPHSGETVADRKQGTGWVVRKQRGKVYPWNFADMVDVKASAEAFITNLTNKCTYLIGEDVLPKRSLLYSEFMLLNELNMIKYDGHELPVAIKQLYIEQVFKQEHKKQTKGRVLDFLKRNGLITGSATAVITGMDDAIKGDLQSYRDMVRIFGAGFDHSMAERIIRWVTLFGEAKDILENKIREVYGNSISDSQMRAIKKLKYADWGRLSQAFLIAVKGCDKSGVERNIITCLRASSQNLMEILSDQGTYIKQIKAWNHQHTTNMMDTLDYQLVDDLYVAPSVKRSIWQSLCIVEELVKIMGQAPKKIFVEVTRTKQAEKTKKDSRKKRLVELYTAIGKEGAAWKKEIEAHQAGDFRRKKLYLYYTQMGRCMYSNEPIAMDALFTSAYDIDHIYPQSLTKDGSWDNLVLVKSQLNKEKSDQYPLRPAIREKNKAHWQYLCRAGFISEKKYERLMRTTELTAEELSGFIARQLVETSQATKAVTGLLERIYTNTEICFVKAETVSQFRHQHNFIKIRELNNYHHAKDAYLNIVVGNVYHEKFTKNPWEFIARSTERRPYNLNRMYDFDLLKQGRVIWQVPKSLETVQAMMKSNDVRITKKLLVQKGELYDATITKAHKAKEGTYFPLKGADARLRDVHRYGGYEKIKIAYYSVFSCREKASNTIHTLIIPIPVYKAGLLQTEADLTAYAWQTKQKTKPIKDIYSAITPIYKKLCINTVVKIDGFKYFLGGKTGDYMWLDPAIPVVLDEQAAAYLKAISKVGRADDVENTAQAIDLITAEANEAFYDVLLKKMEAKIFAKAYQTIVEKLASETARERFRELSIGAQCSCLLEILNLLANNKTTFTFFKDKMGVTMSRRKQPMDLTKLEECIVYETSITGLYEKAVSLL

SEQ ID NO: 239 - protein, 650 aa, Haemophilus pittmaniae
MENKNLHYILGLDLGIASVGWAVVEIDKEENPLCLIDVGVRTFERAEVPKTGESLALSRRLARSARRLTQRRVARLKKAKRLLKLENILLSTDERLPHQVWQLRVEGLDRKLKRQEWAAVLLHLIKHRGYLSQRKNESKSENKELGALLSGVASNHELLQQTTYRTPAELAVKKFEVEEGHIRNQQGAYTHTFSRLDLLAEMELLFSRQQHFGNPFASEKLLENLTALLMWQKPALSGEAILKMLGKCTFEDEYKAAKNTYTAERFVWITKLNNLRIQENGLERALNDNERLILIEQPYEKAKLTYAQVRSILNLSDEAIFKGLRYSGEDKKAIETKTTLMEMKAYHQIRKVLEGNNLKAEWTELKENSTLLDEIGTAFSLYKTDEDISTYLAGKLSQPVLNALLENLSFDKFIQLSLKALYKLLPLMQQGLRYDEACHEMYGDHYGKKTYGKKTEENHYFLPQIPADEIRNPVVLRTLTQARKVINGVVRLYGSPARIHIETGREVGKSYKDRRELEKRQEENRKQRENAIKEFKEYFPHFAGEPKAKDILKMRLYKQQNAKCLYSGKPIELHRLLEKGYVEVDHALPFSRTWDDSFNNKVLVLANENQNKGNLTPFEWLDGKHNSERWRAFKALVETSAFPYAKNNAS

SEQ ID NO: 240 - protein, 1062 aa, Ralstonia syzygii
MAEKQHRWGLDIGTNSIGWAVIALIEGRPAGLVATGSRIFSDGRNPKDGSSLAVERRGPRQMRRRRDRYLRRRDRFMQALINVGLMPGDAAARKALVTENPYVLRQRGLDQALTLPEFGRALFHLNQRRGFQSNRKTDRATAKESGKVKNAIAAFRAGMGNARTVGEALARRLEDGRPVRARMVGQGKDEHYELYIAREWIAQEFDALWASQQRFHAEVLADAARDRLRAILLFQRKLLPVPVGKCFLEPNQPRVAAALPSAQRFRLMQELNHLRVMTLADKRERPLSFQERNDLLAQLVARPKCGFDMLRKIVFGANKEAYRFTIESERRKELKGCDTAAKLAKVNALGTRWQALSLDEQDRLVCLLLDGENDAVLADALREHYGLTDAQIDTLLGLSFEDGHMRLGRSALLRVLDALESGRDEQGLPLSYDKAVVAAGYPAHTADLENGERDALPYYGELLWRYTQDAPTAKNDAERKFGKIANPTVHIGLNQLRKLVNALIQRYGKPAQIVVELARNLKAGLEEKERIKKQQTANLERNERIRQKLQDAGVPDNRENRLRMRLFEELGQGNGLGTPCIYSGRQISLQRLFSNDVQVDHILPFSKTLDDSFANKVLAQHDANRYKGNRGPFEAFGANRDGYAWDDIRARAAVLPRNKRNRFAETAMQDWLHNETDFLARQLTDTAYLSRVARQYLTAICSKDDVYVSPGRLTAMLRAKWGLNRVLDGVMEEQGRPAVKNRDDHRHHAIDAVVIGATDRAMLQQVATLAARAREQDAERLIGDMPTPWPNFLEDVRAAVARCVVSHKPDHGPEGGLHNDTAYGIVAGPFEDGRYRVRHRVSLFDLKPGDLSNVRCDAPLQAELEPIFEQDDARAREVALTALAERYRQRKVWLEELMSVLPIRPRGEDGKTLPDSAPYKAYKGDSNYCYELFINERGRWDGELISTFRANQAAYRRFRNDPARFRRYTAGGRPLLMRLCINDYIAVGTAAERTIFRVVKMSENKITLAEHFEGGTLKQRDADKDDPFKYLTKSPGALRDLGARRIFVDLIGRVLDPGIKGD

SEQ ID NO: 241 - protein, 1052 aa, Haemophilus parainfluenzae
MENKNLHYILGLDLGIASVGWAVVEIDEKENPLRLIDVGVRTFERAETQKGESLALSRRSARSARRLTQRRVARLKKAKRLLKSENILLSTDERLPHQVWQLRVEGLDRKLERQEWAAVLLHLIKHRGYLSQRKNESKSENKELGALLSGVASNHELLQQATYRTPAELAVKKFEVEEGHIRNQQGAYTHTFSRLDLLAEMELLFSRQQHFGNPFASEKLLENLTALLMWQKPALSGEDILKMLGKCTFEDEYKAAKNTYTAERFVWITKLNNLRIQENGLERALSDNERLMLIEQPYEKAKLTYAQVRSILNLSDDAIFKGVRYSGEDKKAIETKTTLMEMKAYHQIRKVLEGNNLKAEWVALKANPTLLDEIGTAFSLYKTDEDISAYLAGKLSQPVLNALLENLSFDKFIQLSLKALYKLLPLMQQGLRYDEACREIYGDHYGKKTEETHHFLPQIPADEIRNPVVLRTLTQARKVINGVVRLYGSPARIHIETGREVGKSYKDRHELKKRQEENRKQREKTISEIKTLFPNFSGEPKGKDILKMRLYYQQNAKCLYSGKPLELHRLFEQKYVEVDHALPLSRTWDDSFNNKVLVLANENQNKGNLTPFEWLDGKNNSERWRTFKALVETSAFPYAKKQRILSQKLDEKGFIERNLNDTRYVARFLCNFIADNMHLTGEGKRKVFASNGQITALLRRRWGLAKSREDNDRHHALDAVLVACSTVAMQQKITRFVRFKAGDVFTGERIDRETGEIIPLHFPTPWQFFKQEVEIRIFSDNPKLELENRLPDRPQANHEFVQPLFVSRMPTRKMTGQGHMETVKSAKRLNEGISMIKMPLTKLKLKDLELMVNREREKDLYDALKTRLEAFNDDPAKAFAEPFMKKGGAIVKSVRVEQVQKSGVLVRQGNGVADNASMVRVDVFTKDGKYFLVPIYTWQVAKGILPNKAVIQGKDEEDWEDIDDATFQFSLHPNDLISVKTKKDEFLGYFNGLNRHTGGINIRTHDLEKSKGKQGIFEGIGVKIALSFEKYQIDELGKNIRLCKPSKRQPVR

SEQ ID NO: 242 - protein, 1331 aa, Lactobacillus sanfranciscensis
MNKQPYNIGLDIGTSSVGWSATELDNRLLHIKGHNGIGVRLFKEGESAADRRGFRTTRRRLARRKWRLRLLNEIFATEIAKVDPSFFARLKQSNVSPKDPNKTMFENILFDDENLDDQKFHHDYKTIYHLRQAIINHPEQKFDIRLIYLAMHHIIKYRGHFLNQANVQDFKGGKIDLEKSFKALNDIFENQGRDLRLVTDKANQYVKVLSDNAKTRSDRKKELSKLLYVPIDKDTDKNSKKVTGEILKAILGNKAKFDVIFGIEVENPKEWVLTFNSDDFDDKIEGLSSQMTDEDSEILLILKELYFALNLSDILNNSVTDKNAKTLSEAMINRYDDHKNQLAMLKKVIDSSDKKHAKELKEAYSAYIDGENNKKISFEDLKKRIQKNLVDSELSQKINDLLDHDYFLPKQRSKENGAIPHQLQQQELDQIIESQKQYYPFLAELNPNEKRSRQAKYKLDELVAFRVPYYVGPMVEVTDSNQENNGKFAWMIRKEQGEITPWNFDEKVDRTETATKFITRMTTTDTYLIGEPVLPKNSLLYQKFVVLNELNNLKINQEIITPGQKQYLYEHVMKKNKRVTLKKIADALVIKGDYPYAPEVKGTTDQKNLNNGLTTYIDLAKIFGNELDDVDREADFEKIIEWSTIFEDQHIFALKLQELKWLTEKQRNQVVKLRYQGWGKLSKELLAGLVDDNGQRIIDLLWSDNQNFMQIVNQKSFKESIADHNGAHLEEKNLKDVINDLYTSPQNKKAIRQVILVVDDIINAVGYEPANIMMEFAREDSNDHRLTNSRSRQLENVYKDITNSWFDNDSVKDELEDKIKNKDKFTDRLYLYFTQGGKDLYTGEPLNIDDLSSYDIDHILPQSFILDNSLDNRVLTSQRNNRVSKEDQLPGELFGTKMHAFWKRLKAAHLISNKKYYNLTLTPNSISKFNNQGRFINRQLVETRQVIKLAAEILHNRYSEEKGTNIVTIKANLTHHMREKFNFYKNRNVNDYHHAFDAYLTAFVGNWLLQQYPKLKPYFVYGDFAKTEINNLKSFNMLYKFEQAHQLNEKDGKIAKDADALLGYMKNVYHFKKMLVTKKLETNHGALFKQTLYPSPAHDIKKRQLIKPKDNRPTDIYGGYTHEERKYMSLVKVIGKKDNEYRMANVPLLKINKNNDIKEILKSQFSNKKFEIVLPKVLKNQLFSENGALFVIGSKGYKYNANQLVLSDLDMKLLNDLSNNKSIDEVTINQLFKNIVDSTNKYMPLYEIKNLNEVVEKFNNLEFNDKKKTITDFLLATHANPTMSNLKNIGLPSYFGRFTSGNAGIKLSENANVIYQSPTGLFSRKVKISDF

SEQ ID NO: 243 - protein, 1473 aa, Flavobacterium branchiophilum
MAKILGLDLGTNSIGWAVVERENIDFSLIDKGVRIFSEGVKSEKGIESSRAAERTGYRSARKIKYRRKLRKYETLKVLSLNRMCPLSIEEVEEWKKSGFKDYPLNPEFLKWLSTDEESNVNPYFFRDRASKHKVSLFELGRAFYHIAQRRGFLSNRLDQSAEGILEEHCPKIEAIVEDLISIDEISTNITDYFFETGILDSNEKNGYAKDLDEGDKKLVSLYKSLLAILKKNESDFENCKSEIIERLNKKDVLGKVKGKIKDISQAMLDGNYKTLGQYFYSLYSKEKIRNQYTSREEHYLSEFITICKVQGIDQINEEEKINEKKFDGLAKDLYKAIFFQRPLKSQKGLIGKCSFEKSKSRCAISHPDFEEYRMWTYLNTIKIGTQSDKKLRFLTQDEKLKLVPKFYRKNDFNFDVLAKELIEKGSSFGFYKSSKKNDFFYWFNYKPTDTVAACQVAASLKNAIGEDWKTKSFKYQTINSNKEQVSRTVDYKDLWHLLTVATSDVYLYEFAIDKLGLDEKNAKAFSKTKLKKDFASLSLSAINKILPYLKEGLLYSHAVFVANIENIVDENIWKDEKQRDYIKTQISEIIENYTLEKSRFEIINGLLKEYKSENEDGKRVYYSKEAEQSFENDLKKKLVLFYKSNEIENKEQQETIFNELLPIFIQQLKDYEFIKIQRLDQKVLIFLKGKNETGQIFCTEEKGTAEEKEKKIKNRLKKLYHPSDIEKFKKKIIKDEFGNEKIVLGSPLTPSIKNPMAMRALHQLRKVLNALILEGQIDEKTIIHIEMARELNDANKRKGIQDYQNDNKKFREDAIKEIKKLYFEDCKKEVEPTEDDILRYQLWMEQNRSEIYEEGKNISICDIIGSNPAYDIEHTIPRSRSQDNSQMNKTLCSQRFNREVKKQSMPIELNNHLEILPRIAHWKEEADNLTREIEIISRSIKAAATKEIKDKKIRRRHYLTLKRDYLQGKYDRFIWEEPKVGFKNSQIPDTGIITKYAQAYLKSYFKKVESVKGGMVAEFRKIWGIQESFIDENGMKHYKVKDRSKHTHHTIDAITIACMTKEKYDVLAHAWTLEDQQNKKEARSIIEASKPWKTFKEDLLKIEEEILVSHYTPDNVKKQAKKIVRVRGKKQFVAEVERDVNGKAVPKKAASGKTIYKLDGEGKKLPRLQQGDTIRGSLHQDSIYGAIKNPLNTDEIKYVIRKDLESIKGSDVESIVDEVVKEKIKEAIANKVLLLSSNAQQKNKLVGTVWMNEEKRIAINKVRIYANSVKNPLHIKEHSLLSKSKHVHKQKVYGQNDENYAMAIYELDGKRDFELINIFNLAKLIKQGQGFYPLHKKKEIKGKIVFVPIEKRNKRDVVLKRGQQVVFYDKEVENPKDISEIVDFKGRIYIIEGLSIQRIVRPSGKVDEYGVIMLRYFKEARKADDIKQDNFKPDGVFKLGENKPTRKMNHNQFTAFVEGIDFKVLPSGKFEKI

SEQ ID NO: 244 - protein, 933 aa, Mycoplasma iowae
SVRDYSDGPGSEKSPTPYGLWRLNKEGKVEKIGENLWDVLVGKCTIYGNDDSIKDEKTKLRGGKNSPIAEVFNFINDLTNIYLFSSSKLKLNSKTKLSILDEFNISLKTSKPIKSFSEKKLVKHIISTTEFKDINFDDVYGYRIDTSKKPLFTKLENTITIAKWLLDNNVYNELNIYDQEDLIKINNIFVILQKSMDINKRAQLVSDEYKIDLPICLELVKKIKGVMQTHSFSYKAMLEYIPVGIKYNDLETGEDTSINASTYFVDKINNLNTKLLFNGRPRKYIPKNIFEDGIISPTSKRAFIQTINVLNKIIKVYSKDYDIDNIAIELPRDKNTAEERKKISSNQKKAGEEIAEVLKFAGLNVEEYTSKLNSKTKLKLKLLKEQNYKDIYDGQEIDVIDVIKNSNKYHEEHIIPYSLCFIDSRRNKVLTKFENNKQKGNKTPFQWLSSIGKYAEFKDRVEKLFVEQKISKAKKELLLFEQDPRTEMLGFIEKNLSDTRYASKLVFDTFRDFFKVNNPNVKIKVINGALTNYARYNLFATYKDGLLERKGIMKQREFYEHHGIDATILAFLGSNHKINQLLKLSHKFKKQDDNKIYDENTGELIEFTKDFLSDEARKKAMELSKQIFEIPCKFSRPIYRKSNVSFSNETLISMKWIDDKYTKGVKINKLSLVNKDLDLNEYFADYETNEMKNLICYQEDKTLYNKLKNIYDKYNNFVENSNIKPVKNPFINYMISNFSSDDSKIQNFKHIIFYDHKGNKKFVKSLKVCGDEKNLSNIVLRKDQKDIMNSKKIKKSGILESLNPISARIYKDNKGKYITIPINSLVLNWTKKGLEIDNEKLCNILKSKNIFNNQFIEINAGQSIINNENKLFYFVGGGDFKVNKLEIKSQFCDNEIFFPRKQMNISIATIIDNYKLCEVDELGKIYNIRKIVL

SEQ ID NO: 245 - protein, 1358 aa, Acidaminococcus intestini; identical to SEQ ID NO: 109

SEQ ID NO: 246 - protein, 983 aa, Campylobacter jejuni
MARILAFDIGISSIGWAFSENDELKDCGVRIFTKAENPKTGESLALPRRLARSARKRLARRKARLNHLKHLIANEFKLNYEDYQSFDESLAKAYKGSLISPYELRFRALNELLSKQDFARVILHIAKRRGYDDIKNSDDKEKGAILKAIKQNEEKLANYQSVGEYLYKEYFQKFKENSKEFTNVRNKKESYERCIAQSFLKDELKLIFKKQREFGFSFSKKFEEEVLSVAFYKRALKDFSHLVGNCSFFTDEKRAPKNSPLAFMFVALTRIINLLNNLKNTEGILYTKDDLNALLNEVLKNGTLTYKQTKKLLGLSDDYEFKGEKGTYFIEFKKYKEFIKALGEHNLSQDDLNEIAKDITLIKDEIKLKKALAKYDLNQNQIDSLSKLEFKDHLNISFKALKLVTPLMLEGKKYDEACNELNLKVAINEDKKDFLPAFNETYYKDEVTNPVVLRAIKEYRKVLNALLKKYGKVHKINIELAREVGKNHSQRAKIEKEQNENYKAKKDAELECEKLGLKINSKNILKLRLFKEQKEFCAYSGEKIKISDLQDEKMLEIDHIYPYSRSFDDSYMNKVLVFTKQNQEKLNQTPFEAFGNDSAKWQKIEVLAKNLPTKKQKRILDKNYKDKEQKNFKDRNLNDTRYIARLVLNYTKDYLDFLPLSDDENTKLNDTQKGSKVHVEAKSGMLTSALRHTWGFSAKDRNNHLHHAIDAVIIAYANNSIVKAFSDFKKEQESNSAELYAKKISELDYKNKRKFFEPFSGFRQKVLDKIDEIFVSKPERKKPSGALHEETFRKEEFYQSYGGKEGVLKALELGKIRKVNGKIVKNGDMFRVDIFKHKKTNKFYAVPIYTMDFALKVLPNKAVARSKKGEIKDWILMDENYEFCFSLYKDSLILIQTKDMQEPEFVYYNAFTSSTVSLIVSKHDNKFETLSKNQKILFKNANEKEVIAKSIGIQNLKVFEKYIVSALGEVTKAEFRQREDFKK

SEQ ID NO: 247 - protein, 1338 aa, Streptococcus macacae
MTKPYSIGLDIGTNSVGWAVVTDGYKVPAKKMKVLGNTDKSHIKKNLLGALLFDSGNTAKDRRLKRTARRRYTRRRNRILYLQEIFAEEMAKADESFFQRLNESFLTNDDKEFDSHPIFGNKAEEEAHHHKFPTIFHLRKHLADSTEKSDLRLIYLALAHMIKFRGHFLIEGQLKAENTNVQTLFDDFVEVYDKTVEESHLSEISVSSILTEKISKSRRLENLIKYYPTEKKNTLFGNLIALSLGLQPNFKTNFKLSEDAKLQFSKDTYEEDLGELLGKIGDNYADLFISAKNLYDAILLSGILTIDDNTTKAPLSASMIKRYEEHQEDLAQLKKFIRQNLPDQYSEVFSDKTKDGYAGYIDGKTNQEAFYKYIKNMLSKTEGADYFLDKIDREDFLRKQRTFDNGSVPHQIHLQEMHAILRRQGEYYPFLKENQDKIEKILTFRIPYYVGPLARKGSRFAWAEYKADKKVTPWNFDDILDKEKSAEEFITRMTLNDLYLPEEKVLPKHSLVYETFNVYNELTKVKYVNEQGKAIFFDANMKQEIFDHVFKENRKVTKDKLLNYLNKEFEEFRIVNLTGLDKENKAFNSSLGTYHDLRKILDKSFLDDKVNEKIIEDIIQTLTLFEDREMIRQRLQKYSDIFTTQQLKKLERRHYTGWGRLSAKLINGIRDKQSNKTILGYLIDDGYSNRNFMQLINDDSLPFKEEIARAQVIGETDDLNQLVSDIAGSPAIKKGILQSLKIVDELVKVMGHNPANIVIEMARENQTTAKGRRSSQQRYKRLEEAIKNLDHDLNHKILKEHPTDNQALQNDRLFLYYLQNGRDMYTEDPLDINRLSDYDIDHIIPQSFIKDDSIDNKVLVSSAKNRGKSDNVPSEDVVNRMRPFWNKLLSCGLISQRKYSNLTKKELKPDDKAGFIKRQLVETRQITKHVAQILDARFNTKRDENKKVIRDVKIITLKSNLVSQFRKDFKFYKVREINDYHHAHDAYLNAVIGKALLDVYPQLEPEFVYGEYPHFHGYKENKATAKKFFYSNIMNFFKKDDIRTDENGEIVWKKDEHISNIKRVLSYPQVNIVKKVEIQTVGQNGGLFDDNPKSPLEVTPSKLVPLKKELNPKKYGGYQKPTTAYPVLLITDTKQLIPISVMNKKQFEQNPVKFLRDRGYQQVGKNDFIKLPKYTLVDIGDGIKRLWASSKEIHKGNQLVVSKKSQILLYHAHHLDSDLSNDYLQNHNQQFDVLFNEIISFSKKCKLGKEHIQKIENVYSNKKNSASIEELAESFIKLLGFTQLGATSPFNFLGVKLNQKQYKGKKDYILPCTEGTLIRQSITGLYETRVDLSKIGED

SEQ ID NO: 248 - protein, 1265 aa, Mycoplasma ovipneumoniae
MHNKKNITIGFDLGIASIGWAIIDSTTSKILDWGTRTFEERKTANERRAFRSTRRNIRRKAYRNQRFINLILKYKDLFELKNISDIQRANKKDTENYEKIISFFTEIYKKCAAKHSNILEVKVKALDSKIEKLDLIWILHDYLENRGFFYDLEEENVADKYEGIEHPSILLYDFFKKNGFFKSNSSIPKDLGGYSFSNLQWVNEIKKLFEVQEINPEFSEKFLNLFTSVRDYAKGPGSEHSASEYGIFQKDEKGKVFKKYDNIWDKTIGKCSFFVEENRSPVNYPSYEIFNLLNQLINLSTDLKTTNKKIWQLSSNDRNELLDELLKVKEKAKIISISLKKNEIKKIILKDFGFEKSDIDDQDTIEGRKIIKEEPTTKLEVTKHLLATIYSHSSDSNWININNILEFLPYLDAICIILDREKSRGQDEVLKKLTEKNIFEVLKIDREKQLDFVKSIFSNTKFNFKKIGNFSLKAIREFLPKMFEQNKNSEYLKWKDEEIRRKWEEQKSKLGKTDKKTKYLNPRIFQDEIISPGTKNTFEQAVLVLNQIIKKYSKENIIDAIIIESPREKNDKKTIEEIKKRNKKGKGKTLEKLFQILNLENKGYKLSDLETKPAKLLDRLRFYHQQDGIDLYTLDKINIDQLINGSQKYEIEHIIPYSMSYDNSQANKILTEKAENLKKGKLIASEYIKRNGDEFYNKYYEKAKELFINKYKKNKKLDSYVDLDEDSAKNRFRFLTLQDYDEFQVEFLARNLNDTRYSTKLFYHALVEHFENNEFFTYIDENSSKHKVKISTIKGHVTKYFRAKPVQKNNGPNENLNNNKPEKIEKNRENNEHHAVDAAIVAIIGNKNPQIANLLTLADNKTDKKFLLHDENYKENIETGELVKIPKFEVDKLAKVEDLKKIIQEKYEEAKKHTAIKFSRKTRTILNGGLSDETLYGFKYDEKEDKYFKIIKKKLVTSKNEELKKYFENPFGKKADGKSEYTVLMAQSHLSEFNKLKEIFEKYNGFSNKTGNAFVEYMNDLALKEPTLKAEIESAKSVEKLLYYNFKPSDQFTYHDNINNKSFKRFYKNIRIIEYKSIPIKFKILSKHDGGKSFKDTLFSLYSLVYKVYENGKESYKSIPVTSQMRNFGIDEFDFLDENLYNKEKLDIYKSDFAKPIPVNCKPVFVLKKGSILKKKSLDIDDFKETKETEEGNYYFISTISKRFNRDTAYGLKPLKLSVVKPVAEPSTNPIFKEYIPIHLDELGNEYPVKIKEHTDDEKLMCTIK

SEQ ID NO: 249 - protein, 1535 aa, Flavobacterium columnare
MTKILGLDLGTNSIGWAIRDTENEGINQILDKGARIFSEGVKSENGKEISRAAERTAYRSARKIKYRRKLRKYETLKVLSINGMCPLSVEEVEQWKKSGFKEYPLNPEFLDWLRTNEDKNINPYLFRDKASKQKVTLFELGRALYHIAQRRGFLSNRLDQSAEGVFEEHNPQIQNLIEDLDSSNTILNELKEYYINLGIIDETEKSGFKKDLDEGEKKLKSLYNSLVAITKKNANDIETCKQELIARLNKKEDLGKVKGKIKDISQAMLDRNFKTLGQYFFSLYNKERIRNQYTSREEHYLEEFIIICQTQGIEGINTNEKLPEKKFTGLAKDLYRAIFFQRPLKSQKGLIGKCSFEKNKSRCAVSHPDYEEFRMWSYLNTIKIGTQSEKTLRFLTLEEKLKLVPKFYRKSDFNFEVLAKELVEKGASFGYYKSSKKNEFFYWFNYKPTDSVSACVVSASLENAIGKDWKIKTFEYQTRNTEKNEVTKSVDYKDLWHLLSVATSDTYLYDFAIEKLKLEPKNAKAFSKTKLKKDFASLSLAAIAKILPYLKQGLLYSHAVFMANIENIVDADIWKDEEQQKFIQSKIVELVDNYIVEKSKLELINGLLKIYNTEDKEGRKVYYSKEAESLFEADLRKKLVPFYKANIIIEEHEQEIIFQDLFPILMDQLKKQEFIKIGRLDKQIEAFLEGENEEGQIFCNHTDKLKKLYHPSDIEVFKKKTIKDEWGNEKVVLGSPLTTSIKNPMAMRALHQLRKVLNTLIANDQIDEDTRIHIEMARELNDANKRKGIQDFQNENKKFREEAIKEIKKLYLEECHKDVNPTEDDILRYQLWLEQGKCEIYEEGNNISICDIIGSNPSYDIEHTIPRSISQDNSQMNKTLCSLKFNRSIKKQKMPVELSNYNDILPRIAHWKKEAEELTRQIETISRSIKSAATKVAKDKNIRKRHYLTLKRDYILGKYERFTWEEPKVGFKNSQIPDTGIITKYAQAYLKSYFKRVESVKGGAVAEFRKLWGIQESFIDENWWKHYKDKDRDKHTHHTIDAITIACMPKDKYDLLAHAWRLEDEQDKKAAKVLIEQAKPWKTFKEDIEKIETEILVSHFTPDNVKKQSKSIIKNRGKKVYVLKNELPVNFKNKIEGKDYFKLKFDSKILYKIPKKKEKQTDTFYEELPKNYLNGVEGKDYFKINTTGKTFYKIPIFNQGDTIRGSLHQETTYGAIKLPDIDIETKKPLHTDKGGFILKKDIKGNEIVFFVVRKEISKISENDVQNIVDNVVRKKIENAIANSLITFKIVKKKKVAVIKEGVTIWMREPNIEKGIEGIPIKKVRIITNSVKNPIEIKVHSPLSKSRHKHKQKVYGQNDENYAMALYELDGKREFELINNFNLAKLLKQSQSYYPLHKEKEIKGKKILVPIEKRNNKDVILKRGQQVVFYDKTVENPKDISEIIDFRERIYIIEGLTIQRQKDKKTSKVNEYGIIQLRHFKEARKSEEISKDNFKPDGEFKINENKPTRKMNHNQFTAFVEGIDFKVLPSGKFQKI

SEQ ID NO: 250 - protein, 1459 aa, Flavobacterium columnare
MKFNLGLDIGTNSIGWALVNEDYENKKGKIIAAGSRIIPMTQDILDKFGSGAITETQTALRTDYRSKRKLIQRFLLRRERLHRVLNVLDFLPKHYAESIDFEKYFGKFLPNTEPKLAYNQNQFIFQNSFLEMLKEFQEKHPELLTNNKKIPYDWTIYYLRKKALNQRIEKEELAWLLLQFNQKRGYNQLRDEEEESVPNKQVEFYSLKIIDVVADQPKEGRDKRWYSINLENGWTYRRESKTPLFNWEGKTKDFIVTTDLNQDGSIKKDKEGKEKRSFRAPSEGDWTLLKKKTEKEIYESGKTLGTYIYDALLNTPDLKIKGDFIRTIDRSIYKEELQQIINKQKEYHLELNSSKLYKACLEELYPKNEIYKSALKNKDIAYLFINDILYYQRPLKAPKYNIGKCTYESRTFKKEDKKIREYIPAVAKSHPLFQEFRLWQWIKNLKIYEKLSSDNCTDFFLTNEQDFENLFEFLWNKKEIDHKGILEYLVKTKFPDLKPKQVKTKVKEYRWNYVYDHEKDESKTYPCGETYFLLKNKLDKIYNAQDDFLDKERLYNLWHIIYSVTDKKQYEKALAKFALKNHLDTKSFVNTFKRIPPFKNDYAIYSLKAIKKLLPLMRVGKYWNYDDIDPITKQKIQCIITGEENDTISTLVREKTNHFSNENDFKNLPLWLAGYIVYNSHNESSEIEKWKSPQDIDTFLKKFKQHALRNPIVEQVVTETLRVVRDIWSKKGQGKKDFFNEIHIELGKDLKNPVDKRRKLSSTNTKNESTNTRIKALLIELFTQGVENVKPNSPKHQEILKIFEEGALNSGIEIEEDIIKISNTDQPTKKQLELYILWLEHKYKSPYTGQSIPLSKLFTPNYEIEHIIPRSKYYDDNLSNKVICETEINRLKNNQLGYEFINNHEIREVTLEEGKTIRLLSPEQYWNFVTTYYAKNKAKRENLLLKELPVQMVEKQLNDTRYVSKYVMQLLSKIVRKEDGTDNGINSTNILSISGKMTRALKNDWDLNDVWNDLLLYRFERLNTITKTNLFTTYSEQKQKRMPIVPDQYAKGFHKKRLDHRHHALDAIVIACITRNHINYMNNQNIQGEKLKKNAIEKENYREILQKSRLDIRAQLCEKKYNDNDPTKYNWVFIKPWADFTENTKDILESIIPSFKQNLRIINKTVNYYEKYNENGKKVKVRQIKGDNWAIRKPLHKETISGKVHLSYKTPAKGKILTATRKVLDSSMDFKSIEKITDTGIQKILKNYLEYKKSPELAFSPEGIEELNATITKYNNGFHHKPIYKVRIYEEGVKFPLGNKGNKKSKYVEAEKGTNLFFAIYKDQENNRYFETIPFNDVLETLKKGMSAVPEKNQEENTLVFALSPQDLVFVPTLDEIENPDIVDFKNLTKDQTNRIYKMVSSSGKQCFFIKAEVATSIVNKMEFSTSNKMENSIEGIQIKSNCWKLKLDRLGTITRVIK

SEQ ID NO: 251 - protein, 1389 aa, Oenococcus kitaharae
MARDYSVGLDIGTSSVGWAAIDNKYHLIRAKSKNLIGVRLFDSAVTAEKRRGYRTTRRRLSRRHWRLRLLNDIFAGPLTDFGDENFLARLKYSWVHPQDQSNQAHFAAGLLFDSKEQDKDFYRKYPTIYHLRLALMNDDQKHDLREVYLAIHHLVKYRGHFLIEGDVKADSAFDVHTFADAIQRYAESNNSDENLLGKIDEKKLSAALTDKHGSKSQRAETAETAFDILDLQSKKQIQAILKSVVGNQANLMAIFGLDSSAISKDEQKNYKFSFDDADIDEKIADSEALLSDTEFEFLCDLKAAFDGLTLKMLLGDDKTVSAAMVRRFNEHQKDWEYIKSHIRNAKNAGNGLYEKSKKFDGINAAYLALQSDNEDDRKKAKKIFQDEISSADIPDDVKADFLKKIDDDQFLPIQRTKNNGTIPHQLHRNELEQIIEKQGIYYPFLKDTYQENSHELNKITALINFRVPYYVGPLVEEEQKIADDGKNIPDPTNHWMVRKSNDTITPWNLSQVVDLDKSGRRFIERLTGTDTYLIGEPTLPKNSLLYQKFDVLQELNNIRVSGRRLDIRAKQDAFEHLFKVQKTVSATNLKDFLVQAGYISEDTQIEGLADVNGKNFNNALTTYNYLVSVLGREFVENPSNEELLEEITELQTVFEDKKVLRRQLDQLDGLSDHNREKLSRKHYTGWGRISKKLLTTKIVQNADKIDNQTFDVPRMNQSIIDTLYNTKMNLMEIINNAEDDFGVRAWIDKQNTTDGDEQDVYSLIDELAGPKEIKRGIVQSFRILDDITKAVGYAPKRVYLEFARKTQESHLTNSRKNQLSTLLKNAGLSELVTQVSQYDAAALQNDRLYLYFLQQGKDMYSGEKLNLDNLSNYDIDHIIPQAYTKDNSLDNRVLVSNITNRRKSDSSNYLPALIDKMRPFWSVLSKQGLLSKHKFANLTRTRDFDDMEKERFIARSLVETRQIIKNVASLIDSHFGGETKAVAIRSSLTADMRRYVDIPKNRDINDYHHAFDALLFSTVGQYTENSGLMKKGQLSDSAGNQYNRYIKEWIHAARLNAQSQRVNPFGFVVGSMRNAAPGKLNPETGEITPEENADWSIADLDYLHKVMNFRKITVTRRLKDQKGQLYDESRYPSVLHDAKSKASINFDKHKPVDLYGGFSSAKPAYAALIKFKNKFRLVNVLRQWTYSDKNSEDYILEQIRGKYPKAEMVLSHIPYGQLVKKDGALVTISSATELHNFEQLWLPLADYKLINTLLKTKEDNLVDILHNRLDLPEMTIESAFYKAFDSILSFAFNRYALHQNALVKLQAHRDDFNALNYEDKQQTLERILDALHASPASSDLKKINLSSGFGRLFSPSHFTLADTDEFIFQSVTGLFSTQKTVAQLYQETK

SEQ ID NO: 252 - protein, 1425 aa, Prevotella micans
MIQKIFGLDLGTNSIGSSVRNLELGENLTEQLEFFSSDIFGSSVSKNSNGREYSLAGNRSAHRRSRGLNEARRRKLWATLDLLIEHGLCPMSPDSLMQWRTYDKQKGLYRQYPIEDKDFNAWIMLDFNGDGKPDYSSPYQLRRELVVRQFDFDQPIERYKLGRALYHIAQHRGFKSSKGETIADQEKNEKKPIAEEGADIANEMKASETKLSKGLVAYMQENHLKTVGEAFAKLEDERVRIRNNESYRAIRSQYQDEIKEIFTYQKKLSVESELYERLTSEKKGVGTIFYKRPLRSQRGNVGKCTLERNKPRCPIGRPEFEEFRAWTLINNIKIRETAGEPYKQLPIKLRQELLKDCFLSKVKADFKFEDIRKYIEKRLGLSFSNDDKTINYKDSVSIAACPVTVRMKKLLGENWANCRIDGEKRRQAHGKNNNNEHIVSYTEEDIWHVCYNAEDPEEVSNFARKALHWDENKIKELVRLWTSIPQGYAMLSLKAIRNINRMLLLGLKYSDAVLLAKLPDIVPVSDEDILAITKEFLQLEDKLNQEKQINNIVNSLIANYKSKLEENRFADHNYQYQLGEGDDEDINTQIKSHIGAKLWVQIGADEQTKIFQAVRSKYQDFFKSYKRKFVESPKLGELLVAFLTEKFPNVKSKQWERLYHPSQIAIYRPIPVDNDRSKLRLGNPNIGAIKNPTVMRVLNTLRRRVNQLLDDGVISPDETRVVVETARELNDANTKWALDRYNRIRRDENEKIRKILKELNPTTNSISEQDIDKARYIFEQCETDFYTDGKVPYYNKDIKKYKLWLEQGGQCLYTGQTINLTNLFNPNAFDMEHTIPKSISFDNSDQNLTLCESYYNRFIKKNNIPTDMPNYDKDVTINGKEYTAIKPRLQRWKERVDRLSRNVDFWKGQARRAQDKDRKDECIREKHLWDMELAYWKGKLERFTMTDVTDGFKNSQLVDTRVITRHAVLYLKSIFNHVEVQRGETTAEFRKILGLQSIDEKKDRSLHSHHAIDATMLTVIPSAAKRDRMLELFYKIEETKKALKNYNDNNKTGLNLELKGLEEKLDKEKKDCRVGRRVNDLDRFINENIIVSHHTKDQALTPAHRRLRKRGKIVGGKEHPRWQTGDSLRGEIHKASYYGAITQFAKDANGKVLMKDGQAQIDPTIYYVIRRELKYKRSTQDSGFTNWEDLEKVIVDTDLFGLMKGQFPEGTSFKDACEQGFYMIKKGKNGEGDVKTHRIRHVRCKAVKTALRIKEQTYKSSKDYKQFFYAAVGDLYVMCYYTDGKKRDFKIYSLYDISNHRKSGTEDIPKFITDKKGNHLPLDYKLRTGDMVLLYKDNPEELKDLDQVNLKRRLYKVNRFESEGLIILLTHHLSTTTERGCSIGKIENYQNLPTAIRCGIKTIKFLIMGKHRDFVIRNGNIEFKH

SEQ ID NO: 253 - protein, 1473 aa, Mucilaginibacter paludis
MKNILGLDLGTNSIGWALIEKDTDQKNGNILGTGSRIIPMSQDIKDEFGKGNSISQTADRTKFRSVRRLRERHLLRRERLHRVLNVLGFLPKHYADQIDFKKRLGKLVNETEPKLVYDNKNFIFKKSFEAMLSDFNQHQPLLLADGKKVPFDWTIYYLRKKALTEKIEKEELAWLILNFNQKRGYYQLRGEEEEENPNKMVAFHSLKIVEVIADESQKGKAETWYSLILENGWIYRRSSKTPLYDWKGKQRDFIVTTDLNDDGSIKTDKEGLEKRSFRAPVEDDWTLVKKKTEQEINRSHKTVGTYIYENLLQDPKQKIKGKLVRTIEREFYKDELKMILKNQQKFHPELNDEHLYINCVRELYRNNQAHQTILSKKDFVHLFIDDIIFYQRPLRSQKSSISNCTLEFRKYKNENGTDQTDYLKAIPKSHPLFQEFRLWQWIYNLGIYQKEDDTNVTDELIKNIDGYQDLFDFLNNKKEIRQDILIKFLVEQTGLKGKPLSSVVAKYRWNFVEDKIYPCNETGTQIRTRLAKVENTPEDFLTAETEIKLWHIIYSVNDKADYEKALKTFAEKHNLDTHSFVENFKKFPPFKSEYGSFSEKAIKKLLPLIRLGKYWSWENIDKKTQERIEKILTGEFDEAIKSRVRDKAIHLTEEDHFQGLQLWLASYVVYGRHSEADNLDKWHTVADLEDYLAEFRQHSLRNPIVEQVITETLRVVKDIWLQYGQGAKDFFSEIHIELAREMKNTGDERKRLTSLVTDNENTNLRIKVLLSELLNDGNVENVRPYSPMQQEALKIFEDGVLNSDIEIEDDILKISKMAQPTNTELKRYKLWLEQKYRSPYTGQIIPLNRLFTADYEIEHIIPQSRFFDDSFSNKIICESAVNQLKDKQLGLEFIKNHSGTIVKLGMGKTAKILDVESYNEFVKGNYTKNISKRNKLMLEEIPDKMIERQLNDTRYISKFIISALSNIVRSESNDDGFNSKNVLPGNGKITSRLKQDWGMNDIWNELILPRFERMNKITDSAVFTAWNENNQKFLPIVPLEFSKGFQKKRIDHRHHALDALVIAASTREHINLLNNEHAKSDKRFDLNRKLRKFEKVAYNDPKTGKRIEKEVPTIFLKPWETFTVDAKNSLESIIVSFKQNLRVINRATNYSESYNDENGALRLGKDGNPLKEKIKQSKGDSWAIRKPMHKDFVYGKVHLQNVKLPKDKFITAIRKSLDVTFDLKRIETITDTGIQKILKNYLHSKENKVELAFSPEGIEDMNQHIERYNDGKKHQPIHKVRVFEIGSRFSLGESGNKKTKFVEAAKGTNLFFAVYQDDNKGKRNYETIPLNIVIERQKLGLHSVPTEDAKGGKLLFHLSPNDMVYVPTSEELEDNLASVNIKRLNTAQRKRIYKVEKASGVECYFIRQDIAYLIKNYDAKTKIGELESQNKLQTTMTDDRLKITDVCVKLNIDRLGSIAETFLGNQYGASKKT

SEQ ID NO: 254 - protein, 1365 aa, Filifactor alocis
MTKEYYLGLDVGTNSVGWAVTDSQYNLCKFKKKDMWGIRLFESANTAKDRRLQRGNRRRLERKKQRIDLLQEIFSPEICKIDPTFFIRLNESRLHLEDKSNDFKYPLFIEKDYSDIEYYKEFPTIFHLRKHLIESEEKQDIRLIYLALHNIIKTRGHFLIDGDLQSAKQLRPILDTFLLSLQEEQNLSVSLSENQKDEYEEILKNRSIAKSEKVKKLKNLFEISDELEKEEKKAQSAVIENFCKFIVGNKGDVCKFLRVSKEELEIDSFSFSEGKYEDDIVKNLEEKVPEKVYLFEQMKAMYDWNILVDILETEEYISFAKVKQYEKHKTNLRLLRDIILKYCTKDEYNRMFNDEKEAGSYTAYVGKLKKNNKKYWIEKKRNPEEFYKSLGKLLDKIEPLKEDLEVLTMMIEECKNHTLLPIQKNKDNGVIPHQVHEVELKKILENAKKYYSFLTETDKDGYSVVQKIESIFRFRIPYYVGPLSTRHQEKGSNVWMVRKPGREDRIYPWNMEEIIDFEKSNENFITRMTNKCTYLIGEDVLPKHSLLYSKYMVLNELNNVKVRGKKLPTSLKQKVFEDLFENKSKVTGKNLLEYLQIQDKDIQIDDLSGFDKDFKTSLKSYLDFKKQIFGEEIEKESIQNMIEDIIKWITIYGNDKEMLKRVIRANYSNQLTEEQMKKITGFQYSGWGNFSKMFLKGISGSDVSTGETFDIITAMWETDNNLMQILSKKFTFMDNVEDFNSGKVGKIDKITYDSTVKEMFLSPENKRAVWQTIQVAEEIKKVMGCEPKKIFIEMARGGEKVKKRTKSRKAQLLELYAACEEDCRELIKEIEDRDERDFNSMKLFLYYTQFGKCMYSGDDIDINELIRGNSKWDRDHIYPQSKIKDDSIDNLVLVNKTYNAKKSNELLSEDIQKKMHSFWLSLLNKKLITKSKYDRLTRKGDFTDEELSGFIARQLVETRQSTKAIADIFKQIYSSEVVYVKSSLVSDFRKKPLNYLKSRRVNDYHHAKDAYLNIVVGNVYNKKFTSNPIQWMKKNRDTNYSLNKVFEHDVVINGEVIWEKCTYHEDTNTYDGGTLDRIRKIVERDNILYTEYAYCEKGELFNATIQNKNGNSTVSLKKGLDVKKYGGYFSANTSYFSLIEFEDKKGDRARHIIGVPIYIANMLEHSPSAFLEYCEQKGYQNVRILVEKIKKNSLLIINGYPLRIRGENEVDTSFKRAIQLKLDQKNYELVRNIEKFLEKYVEKKGNYPIDENRDHITHEKMNQLYEVLLSKMKKFNKKGMADPSDRIEKSKPKFIKLEDLIDKINVINKMLNLLRCDNDTKADLSLIELPKNAGSFVVKKNTIGKSKIILVNQSVTGLYENRREL

SEQ ID NO: 255 - protein, 1130 aa, Streptococcus macedonicus
MTNGKILGLDIGIASVGVGIIEAKTGKVVHANSRLFSAANAENNAERRGFRGSRRLNRRKKHRVKRVRDLFEKYGIVTDFRNLNLNPYELRVKGLTEQLTNEELFAALRTISKRRGISYLDDAEDDSTGSTDYAKSIDENRRLLKTKTPGQIQLERLEKYGQLRGNFTVYDENGEAHRLINVFSTSDYEKEARKILETQADYNKKITAEFIDDYVEILTQKRKYYHGPGNEKSRTDYGRFRTDGTTLENIFGILIGKCNFYPDEYRASKASYTAQEYNFLNDLNNLKVPTETGKLSTEQKESLVEFAKNTAILGPAKLLKEIAKILDCKVDEIKGYREDDKGKPDLHTFEPYRKLKFNLDSVNIDYLSREVLDKLADILTLNTEREGIEDAIKRNLPNQFTEEQISEIINVRKSQSTAFNKGWHSFSAKLMNELIPELYATSDEQMTILTRLEKFKVKKKSSKNIKTIDEKEITDEIYNPVVAKSVRQTIKIINAAVKKYGDFDKIVIEMPRDKNADDEKKFINKRNKENKKEKDDALKRAAYLYNGTDKLPDEVFHGNKQLETKIRLWYQQGERCLYSGKPIPIQELVHNSNNFEIDHILPLSLSFDDSLANKVLVYSWTNQEKGQKTPYQVIDSMDAAWSFREMKEYVLKQKGLGKKKRDYLLTTENIDKIEVKKKFIERNLVDTRYASRVVLNSLQSALRELGKDTKVSVVRGQFTSQLRRKWKIDKSRETYHHHAVDALIIAASSQLKLWEKQDNPMFVDYGNNQVVDKQTGEILSVSDNEYKELVFQPPYQGFVNTISSKGFEDEILFSYQVDSKYNRKVSDATIYSTRKAKIGKDKKEETYVLGKIKDIYSQNGFDTFVKKYNKDKTQFLMYQKDPLTWENVIEVILGDYPTTKKSEDGKNDVKCNPFEEYRRENGLICKYSKKGKGTPIKSLKYYDKKLGNCIDITPEESRNKVILQSINPWRADVYFNPETLKYELMGLKYSDLSFEKGTGNYHISQEKYDAIKEKEGIGKKSEFKFTLYRNDLILIKDIASGEQEIYRFLSRTMPNVNHYVELKPYDKEKFDNVQELVEALGEADKVGRCIKSLNKPNISIYKVRTDVLGNKYFVKKEGDKPKLDFKNNKK

SEQ ID NO: 256 - protein, 1367 aa, Streptococcus pyogenes
MDKKYSIGLDIGTNSVGWAVITDDYKVPSKKFKVLGNTDRHSIKKNLIGALLFGSGETAEATRLKRTARRRYTRRKNRICYLQEIFSNEMAKVDDSFFHRLEESFLVEEDKKHERHPIFGNIVDEVAYHEKYPTIYHLRKKLADSTDKADLRLIYLALAHMIKFRGHFLIEGDLNPDNSDVDKLFIQLVQIYNQLFEENPINASRVDAKAILSARLSKSRRLENLIAQLPGEKRNGLFGNLIALSLGLTPNFKSNFDLAEDAKLQLSKDTYDDDLDNLLAQIGDQYADLFLAAKNLSDAILLSDILRVNSEITKAPLSASMIKRYDEHHQDLTLLKALVRQQLPEKYKEIFFDQSKNGYAGYIDGGASQEEFYKFIKPILEKMDGTEELLVKLNREDLLRKQRTFDNGSIPHQIHLGELHAILRRQEDFYPFLKDNREKIEKILTFRIPYYVGPLARGNSRFAWMTRKSEETITPWNFEEVVDKGASAQSFIERMTNFDKNLPNEKVLPKHSLLYEYFTVYNELTKVKYVTEGMRKPAFLSGEQKKAIVDLLFKTNRKVTVKQLKEDYFKKIECFDSVEISGVEDRFNASLGAYHDLLKIIKDKDFLDNEENEDILEDIVLTLTLFEDRGMIEERLKTYAHLFDDKVMKQLKRRRYTGWGRLSRKLINGIRDKQSGKTILDFLKSDGFANRNFMQLIHDDSLTFKEDIQKAQVSGQGHSLHEQIANLAGSPAIKKGILQTVKIVDELVKVMGHKPENIVIEMARENQTTQKGQKNSRERMKRIEEGIKELGSQILKEHPVENTQLQNEKLYLYYLQNGRDMYVDQELDINRLSDYDVDHIVPQSFIKDDSIDNKVLTRSDKNRGKSDNVPSEEVVKKMKNYWRQLLNAKLITQRKFDNLTKAERGGLSELDKAGFIKRQLVETRQITKHVAQILDSRMNTKYDENDKLIREVKVITLKSKLVSDFRKDFQFYKVREINNYHHAHDAYLNAVVGTALIKKYPKLESEFVYGDYKVYDVRKMIAKSEQEIGKATAKYFFYSNIMNFFKTEITLANGEIRKRPLIETNGETGEIVWDKGRDFATVRKVLSMPQVNIVKKTEVQTGGFSKESILPKRNSDKLIARKKDWDPKKYGGFDSPTVAYSVLVVAKVEKGKSKKLKSVKELLGITIMERSSFEKNPIDFLEAKGYKEVKKDLIIKLPKYSLFELENGRKRMLASAGELQKGNELALPSKYVNFLYLASHYEKLKGSPEDNEQKQLFVEQHKHYLDEIIEQISEFSKRVILADANLDKVLSAYNKHRDKPIREQAENIIHLFTLTNLGAPAAFKYFDTTIDRKRYTSTKEVLDATLIHQSITGLYETRIDLSQLGGD

SEQ ID NO: 257 - protein, 1233 aa, Mycoplasma canis
MEKKRKVTLGFDLGIASVGWAIVDSETNQVYKLGSRLFDAPDTNLERRTQRGTRRLLRRRKYRNQKFYNLVKRTEVFGLSSREAIENRFRELSIKYPNIIELKTKALSQEVCPDEIAWILHDYLKNRGYFYDEKETKEDFDQQTVESMPSYKLNEFYKKYGYFKGALSQPTESEMKDNKDLKEAFFFDFSNKEWLKEINYFFNVQKNILSETFIEEFKKIFSFTRDISKGPGSDNMPSPYGIFGEFGDNGQGGRYEHIWDKNIGKCSIFTNEQRAPKYLPSALIFNFLNELANIRLYSTDKKNIQPLWKLSSVDKLNILLNLFNLPISEKKKKLTSTNINDIVKKESIKSIMISVEDIDMIKDEWAGKEPNVYGVGLSGLNIEESAKENKFKFQDLKILNVLINLLDNVGIKFEFKDRNDIIKNLELLDNLYLFLIYQKESNNKDSSIDLFIAKNESLNIENLKLKLKEFLLGAGNEFENHNSKTHSLSKKAIDEILPKLLDNNEGWNLEAIKNYDEEIKSQIEDNSSLMAKQDKKYLNDNFLKDAILPPNVKVTFQQAILIFNKIIQKFSKDFEIDKVVIELAREMTQDQENDALKGIAKAQKSKKSLVEERLEANNIDKSVFNDKYEKLIYKIFLWISQDFKDPYTGAQISVNEIVNNKVEIDHIIPYSLCFDDSSANKVLVHKQSNQEKSNSLPYEYIKQGHSGWNWDEFTKYVKRVFVNNVDSILSKKERLKKSENLLTASYDGYDKLGFLARNLNDTRYATILFRDQLNNYAEHHLIDNKKMFKVIAMNGAVTSFIRKNMSYDNKLRLKDRSDFSHHAYDAAIIALFSNKTKTLYNLIDPSLNGIISKRSEGYWVIEDRYTGEIKELKKEDWTSIKNNVQARKIAKEIEEYLIDLDDEVFFSRKTKRKTNRQLYNETIYGIATKTDEDGITNYYKKEKFSILDDKDIYLRLLREREKFVINQSNPEVIDQIIEIIESYGKENNIPSRDEAINIKYTKNKINYNLYLKQYMRSLTKSLDQFSEEFINQMIANKTFVLYNPTKNTTRKIKFLRLVNDVKINDIRKNQVINKFNGKNNEPKAFYENINSLGAIVFKNSANNFKTLSINTQIAIFGDKNWDIEDFKTYNMEKIEKYKEIYGIDKTYNFHSFIFPGTILLDKQNKEFYYISSIQTVRDIIEIKFLNKIEFKDENKNQDTSKTPKRLMFGIKSIMNNYEQVDISPFGINKKIFE

SEQ ID NO: 258 - protein, 1375 aa, Lactobacillus johnsonii
MTKIKDDYIVGLDIGTDSCGWVAMNSNNDILKLQGKTAIGSRLFEGGKSAAERRLFRTTHRRIKRRRWRLKLLEEFFDPYMAEVDPYFFARLKESGLSPLDKRKTVSSIVFPTSAEDKKFYDDYPTIYHLRYKLMTEDEKFDLREVYLAIHHIIKYRGNFLYNTSVKDFKASKIDVKSSIEKLNELYENLGLDLNVEFNISNTAEIEKVLKDKQIFKRDKVKKIAELFAIKTDNKEQSKRIKDISKQVANAVLGYKTRFDTIALKEISKDELSDWNFKLSDIDADSKFEALMGNLDENEQAILLTIKELFNEVTLNGIVEDGNTLSESMINKYNDHRDDLKLLKEVIENHIDRKKAKELALAYDLYVNNRHGQLLQAKKKLGKIKPRSKEDFYKVVNKNLDDSRASKEIKKKIELDSFMPKQRTNANGVIPYQLQQLELDKIIENQSKYYPFLKEINPVSSHLKEAPYKLDELIRFRVPYYVGPLISPNESTKDIQTKKNQNFAWMIRKEEGRITPWNFDQKVDRIESANKFIKRMTTKDTYLFGEDVLPANSLLYQKFTVLNELNNIRINGKRISVDLKQEIYENLFKKHTTVTVKKLENYLKENHNLVKVEIKGLADEKKFNSGLTTYNRFKNLNIFDNQIDDLKYRNDFEKIIEWSTIFEDKSIYKEKLRSIDWLNEKQINALSNIRLQGWGRLSKKLLAQLHDHNGQTIIEQLWDSQNNFMQIVTQADFKDAIAKANQNLLVATSVEDILNNAYTSPANKKAIRQVIKVVDDIVKAASGKVPKQIAIEFTRDADENPKRSQTRGSKLQKVYKDLSTELASKTIAEELNEAIKDKKLVQDKYYLYFMQLGRDAYTGEPINIDEIQKYDIDHILPQSFIKDDALDNRVLVSRAVNNGKSDNVPVKLFGNEMAANLGMTIRKMWEEWKNIGLISKTKYNNLLTDPDHINKYKSAGFIRRQLVETSQIIKLVSTILQSRYPNTEIITVKAKYNHYLREKFDLYKSREVNDYHHAIDAYLSAICGNLLYQNYPNLRPFFVYGQYKKFSSDPDKEKAIFNKTRKFSFISQLLKNKSENSKEIAKKLKRAYQFKYMLVSRETETRDQEMFKMTVYPRFSHDTVKAPRNLIPKKMGMSPDIYGGYTNNSDAYMVIVRIDKKKGTEYKILGIPTRELVNLKKAEKEDHYKSYLKEILTPRILYNKNGKRDKKITSFEIVKSKIPYKQVIQDGDKKFMLGSSTYVYNAKQLTLSTESMKAITNNFDKDSDENDALIKAYDEILDKVDKYLPLFDINKFREKLHSGREKFIKLSLEDKKDTILKVLEGLHDNAVMTKIPTIGLSTPLGFMQFPNGVILSENAKLIYQSPTGLFKKSVKISDL

SEQ ID NO: 259 - protein, 1053 aa, Staphylococcus aureus
MKRNYILGLDIGITSVGYGIIDYETRDVIDAGVRLFKEANVENNEGRRSKRGARRLKRRRRHRIQRVKKLLFDYNLLTDHSELSGINPYEARVKGLSQKLSEEEFSAALLHLAKRRGVHNVNEVEEDTGNELSTKEQISRNSKALEEKYVAELQLERLKKDGEVRGSINRFKTSDYVKEAKQLLKVQKAYHQLDQSFIDTYIDLLETRRTYYEGPGEGSPFGWKDIKEWYEMLMGHCTYFPEELRSVKYAYNADLYNALNDLNNLVITRDENEKLEYYEKFQIIENVFKQKKKPTLKQIAKEILVNEEDIKGYRVTSTGKPEFTNLKVYHDIKDITARKEIIENAELLDQIAKILTIYQSSEDIQEELTNLNSELTQEEIEQISNLKGYTGTHNLSLKAINLILDELWHTNDNQIAIFNRLKLVPKKVDLSQQKEIPTTLVDDFILSPVVKRSFIQSIKVINAIIKKYGLPNDIIIELAREKNSKDAQKMINEMQKRNRQTNERIEEIIRTTGKENAKYLIEKIKLHDMQEGKCLYSLEAIPLEDLLNNPFNYEVDHIIPRSVSFDNSFNNKVLVKQEENSKKGNRTPFQYLSSSDSKISYETFKKHILNLAKGKGRISKTKKEYLLEERDINRFSVQKDFINRNLVDTRYATRGLMNLLRSYFRVNNLDVKVKSINGGFTSFLRRKWKFKKERNKGYKHHAEDALIIANADFIFKEWKKLDKAKKVMENQMFEEKQAESMPEIETEQEYKEIFITPHQIKHIKDFKDYKYSHRVDKKPNRELINDTLYSTRKDDKGNTLIVNNLNGLYDKDNDKLKKLINKSPEKLLMYHHDPQTYQKLKLIMEQYGDEKNPLYKYYEETGNYLTKYSKKDNGPVIKKIKYYGNKLNAHLDITDDYPNSRNKVVKLSLKPYRFDVYLDNGVYKFVTVKNLDVIKKENYYEVNSKCYEEAKKLKKISNQAEFIASFYNNDLIKINGELYRVIGVNNDLLNRIEVNMIDITYREYLENMNDKRPPRIIKTIASKTQSIKKYSTDILGNLYEVKSKKHPQIIKKG

SEQ ID NO: 260 - protein, 1063 aa, Simonsiella muelleri
MEKFHYVLGLDLGIASVGWAAIEIDKETETSIGLLDCGVRTFERAEVPKTGDSLAKARREARSTRRLIRRRSHRLLRLKRLLKREIFRQPETFKDLPINAWQLRVKGLDSRLNEYEWAAVLLHLVKHRGYLSQRKSEMSETDSKSEMGRLLAGVAENHQLLQQEQYRTPAELALKKFVKHFRNKGGDYAHTFNRLDLQAELHLLFQKQRELGNPFTSPELERQVDDLLMTQRSALQGDAILKMLGHCGFEPEQFKAAKNTFSAERFIWLTKLNNLRIQDQGKERALTADERTKLLDEPYKKSKLTYAQVRKLLSLPQTAIFKGLRYDLEHDKKAENSTLMEMKSYHNIRQTLEKSGLKTEWQSIATQPEILDAIGTAFSIYKTDEDISHELKTCRLPENVLNELLKNINFDGFIQLSLTALRKILPLMEQGYRYDEACTQIYGNHHSGSLQQESKQFLPHIPIDDVRNPVVFRTLTQARKVVNAIIRRYGSPARVHIEMARELGKSKSDRDRIEKQQQKNKKERENAVAKFKEDFPDFVGEPRGKDILKMRLYEQQHGKCLYSGHDIDINRLNEKGYVEIDHALPFSRTWDDSQNNKVLVLGSENQNKRNQTPDEYLDGANNSQRWLEFQARVQTCHFSYGKKQRIQLAKLDDETEKGFLERNLNDTRYIARFMCQFVQENLYLTGKGKRLVFASNGGMTATLRNLWGLRKVREDNDRHHALDAIVVACSTASMQQKITKAFQRHESIEYVDTETGEVKFRIPQPWDFFRQEVMIRVFSDQPCEDLVEKLSARPEALHDNVTPLFVSRAPNRKMSGQGHLETIKSAKRLSEENSMVKKPLTTLKLKDIPEIVGYPSREPQLYAALKTRLETHDDDPIKAFAKPFYKPNKNGELGALVRSVRVKGVQNTGVMVHDGKGIADNATMVRVDVYTKAGKNYLVPVYVWQVAQGILPNRAVTSGKSEADWDLIDESFEFKFSLSRGDLVEMISNKGRIFGYYNGLDRANGSIGIREHDLEKSKGKDGVHRVGVKTATAFNKYHVDPLGKEIHRCSSEPRPTLKIKSKK

SEQ ID NO: 261 - protein, 1509 aa, Psychroflexus torquis
MKRILGLDLGTNSIGWSLIEHDFKNKQGQIEGLGVRIIPMSQEILGKFDAGQSISQTADRTKYRGVRRLYQRDNLRRERLHRVLKILDFLPKHYSESIDFQDKVGQFKPKQEVKLNYRKNEKNKHEFVFMNSFIEMVSEFKNAQPELFYNKGNGEETKIPYDWTLYYLRKKALTQQITKEELAWLILNFNQKRGYYQLRGEDIDEDKNKKYMQLKVNNLIDSGAKVKGKVLYNVIFDNGWKYEKQIVNKDEWEGRTKEFIITTKTLKNGNIKRTYKAVDSEIDWAAIKAKTEQDINKANKTVGEYIYESLLDNPSQKIRGKLVKTIERKFYKEEFEKLLSKQIELQPELFNESLYKACIKELYPRNENHQSNNKKQGFEYLFTEDIIFYQRPLKSQKSNISGCQFEHKIYKQKNKKTGKLELIKEPIKTISRSHPLFQEFRIWQWLQNLKIYNKEKIENGKLEDVTTQLLPNNEAYVTLFDFLNTKKELEQKQFIEYFVKKKLIDKKEKEHFRWNFVEDKKYPFSETRAQFLSRLAKVKGIKNTEDFLNKNTQVGSKENSPFIKRIEQLWHIIYSVSDLKEYEKALEKFAEKHNLEKDSFLKNFKKFPPFVSDYASYSKKAISKLLPIMRMGKYWSESAVPTQVKERSLSIMERVKVLPLKEGYSDKDLADLLSRVSDDDIPKQLIKSFISFKDKNPLKGLNTYQANYLVYGRHSETGDIQHWKTPEDIDRYLNNFKQHSLRNPIVEQVVMETLRVVRDIWEHYGNNEKDFFKEIHVELGREMKSPAGKREKLSQRNTENENTNHRIREVLKELMNDASVEGGVRDYSPSQQEILKLYEEGIYQNPNTNYLKVDEDEILKIRKKNNPTQKEIQRYKLWLEQGYISPYTGKIIPLTKLFTHEYQIEHIIPQSRYYDNSLGNKIICESEVNEDKDNKTAYEYLKVEKGSIVFGHKLLNLDEYEAHVNKYFKKNKTKLKNLLSEDIPEGFINRQLNDSRYISKLVKGLLSNIVRENGEQEATSKNLIPVTGVVTSKLKQDWGLNDKWNEIIAPRFKRLNKLTNSNDFGFWDNDINAFRIQVPDSLIKGFSKKRIDHRHHALDALVVACTSRNHTHYLSALNAENKNYSLRDKLVIKNENGDYTKTFQIPWQGFTIEAKNNLEKTVVSFKKNLRVINKTNNKFWSYKDENGNLNLGKDGKPKKKLRKQTKGYNWAIRKPLHKETVSGIYNINAPKNKIATSVRTLLTEIKNEKHLAKITDLRIRETILPNHLKHYLNNKGEANFSEAFSQGGIEDLNKKITTLNEGKKHQPIYRVKIFEVGSKFSISEDENSAKSKKYVEAAKGTNLFFAIYLDEENKKRNYETIPLNEVITHQKQVAGFPKSERLSVQPDSQKGTFLFTLSPNDLVYVPNNEELENRDLFNLGNLNVEQISRIYKFTDSSDKTCNFIPFQVSKLIFNLKKKEQKKLDVDFIIQNEFGLGSPQSKNQKSIDDVMIKEKCIKLKIDRLGNISKA

SEQ ID NO: 262 - protein, 1112 aa, Staphylococcus simulans
MLVGLKFKQSILFENMENAEDIKESATGSDAISLSDDYYENLSEFLTDEQLNFIESANTFFMGIMLDRILKGATSISAAKVRDYKIFKSQLKLIKDIVYQNKYDKYHEFFVTSKEDMRAYQENPDAKNFGKLSKFDQYLIHSKDQYAKLMKDLKGLVPKEYTEVLNLIDEQKFLVVQNTTDNASIPYQNNVFEAENILRNQQKYYPEITEEMIGKVINLISFRIPYYVGPLTNKNGQSDFAWMIRKSDEQTLPWNFDKVIDKSKSAEKFIRRMTSKCTYLLEEDVLPKHSLLYQEMEVLNELNNVQLRGENEPKHRIHRLDPKVKQFIYHNLFQKKKNVTHKDLITLLQNSEHRNTLNKTSGQKLKVFGTQNDSKFASKLSTYNDMKAILGSVENKRQMIEELVLWITIFEDKAILKQKIGEKYPNITEKQLNQIVKLNYSGWGRLSEKLLTKEVNGRSLIDLMYSTENNFMEIITDKTLGFDCFIKNSNKVKNAKISYKDVAELRTSPALKKGIWNAIKMVREISNLFGAPEKIIIEFATEDQAKGKRQKSRSELWDDLVKKNNLKRNKEFEGLFEELKAYPDLDFSNPKLWLYIHQNGKCMYTKKPIDLERLMSDTNNQLYEIDHILPRTFVKDDSINNKVLVIQSANQKKSGDKMPLEIFDNHVLVPFWKMLYENDLISSSKLSKLMKKEFNDLDKEGFIQRQLVETRQIISHVSDFLTEEYPSTTVVPMKANVVSELRRKFDIPKIRQLNDWHHAVDAYLNGFVYQAARVFYPKVNLFEFNFKWEKVREKWRQLGEFTENNKKREFFLFKRMENYVNEYGEGMISKLIFDLDNFKFNYSRKVESTESAFYKQSAFSPKNTTAQYDSDKNKTAIYKEMKNKRGIVVSYTYVKKDQELIGYGVFNETVFEYVNNADVDMNTRALKIVRKAFPKLDIKKAQYLFSINKGDALLVNGHPFLFVSAYERINGKQLEFDIAMQRKIKQALSPYNNMTEQEKVEFYNQFAEKVIEEFRNSIGLQSRDRKVNLIKNLFNNTEKSNDSMTQSILEVLKMTKVSAERSKELKIRWNGQTPNTFIDTKNNAEIQYKSITGLKTTKPKSIFKLAESKNEL

SEQ ID NO: 263 - protein, 1274 aa, Mycoplasma gallisept
MNINMNNSIKSKPEVTIGLDLGVGSVGWAIVDNETNIIHHLGSRLFSQAKTAEDRRSFRGVRRLIRRRKYKLKRFVNLIWKYNSYFGFKNKEDILNNYQEQQKLHNTVLNLKLEALNAKIDPKALSWILHDYLKNRGHFYEDNRDFNVYPTEELANYFDEFGYYKGIIDSKNDDDDKLEEGLTKYKFSNQHWLEEVKKVLSNQTGLPEKFKEEYESLFSYVRNYSEGPGSINSVSPYGIYHLDEKEGKVVQKYNNIWDKTIGKCSIFPDEYRAPKNSPIAMIFNEINELSTIRSYSIYLTGWFINQEFKKAYLNKLLDLLIKTNSEKPIDARQFKKLREETIAESIGKETLKDVESEEKLEKDDHKWKLKGLKLNTNGKIQYNDLSSLAKFVHKLKQHLKLDFLLEDQYTPLDKINFLQSLYVYLGKHLRYSNRVDSANLKEFSDSSRLFERVLQEQKDGLFKLFEQTDKDDEKILTQTHSLSTKAMLLAITRMTNLDNDEDNQKNNDKGWNFEAIKNFDQKFIDITKTNNNLSLKQDKRYLDDQFINDAILSPGVKRILREATKVFNAILKQFSEEYDVTKVVIELARELSEEKELENTKNYKKLIKKNGDKISEGLKALGIAEDKIEEILKSPTKSYKVLLWLQQDHIDPYSQKEIAFDDILTKTEKTEIDHIIPYSISFDDSSSNKLLVLAESNQAKSNQTPYEFINSGKAEITWEVYEAYCHKFKNGDSSLLDSTQRSKKFAKMMKTDTSSKYDIGFLARNLNDTRYATIVFRDALKDYANNHLVEDKPMFKVVCINGGVTSFLRKNFDPKSWYAKKDRDKNIHHAVDASIISIFSNETKTLFNQLTKFADYKLFKNTDGSWKKIDPKTGVVSEVTDENWKQIRVRNQVSEIAKVIDKYIQDSNIERKARYSRKIENKTNISLFNDTVYSAKKVGYEDQIKRKNLKTLDIHESAEENKNSKVKKQFVYRKLVNVSLLNNDKLADLFAEKEDILMYRANPWVINLAEQIFNEYTENKKIKSQNVFEKYMLDLTKEFPEKFSEAFVKSMIRNKTAIIYNVEKDVVHRIKRLKILSSELKENKWSNVIIRSKNESGTKLSYQDTINSIALMIMRSIDPTAKKQYIRVPLNTLNLHLGDQDFDLHNIDAYLKKPKFVKYLKANEIGDEYKPWRVLTSGTLLIHKKDKKLMYISSFQNLNDLIEIKNLIETEYKENVDSDPKKKKKASQILRSLSVILNDYILLDAKYNFDILGLSKNKIDEILNSKLDLDKIAK

SEQ ID NO: 264 - protein, 1122 aa, Artificial Sequence; identical to SEQ ID NO: 33
  synthetic peptide sequence

SEQ ID NO: 265 - protein, 1236 aa, Artificial Sequence; identical to SEQ ID NO: 31
  synthetic peptide sequence

SEQ ID NO: 266 - protein, 1059 aa, Artificial Sequence; identical to SEQ ID NO: 25
  synthetic peptide sequence

SEQ ID NO: 267 - protein, 1166 aa, Artificial Sequence; identical to SEQ ID NO: 49
  synthetic peptide sequence

SEQ ID NO: 268 - protein, 1149 aa, Artificial Sequence; identical to SEQ ID NO: 47
  synthetic peptide sequence

SEQ ID NO: 269 - protein, 1314 aa, Artificial Sequence; identical to SEQ ID NO: 37
  synthetic peptide sequence

SEQ ID NO: 270 - protein, 1064 aa, Artificial Sequence; identical to SEQ ID NO: 48
  synthetic peptide sequence

SEQ ID NO: 271 - protein, 1401 aa, Artificial Sequence
  synthetic peptide sequence
MDKKYSIGLDIGTNSVGWAVITDEYKVPSKKFKVLGNTDRHSIKKNLIGALLFDSGETAEATRLKRTARRRYTRRKNRICYLQEIFSNEMAKVDDSFFHRLEESFLVEEDKKHERHPIFGNIVDEVAYHEKYPTIYHLRKKLVDSTDKADLRLIYLALAHMIKFRGHFLIEGDLNPDNSDVDKLFIQLVQTYNQLFEENPINASGVDAKAILSARLSKSRRLENLIAQLPGEKKNGLFGNLIALSLGLTPNFKSNFDLAEDAKLQLSKDTYDDDLDNLLAQIGDQYADLFLAAKNLSDAILLSDILRVNTEITKAPLSASMIKRYDEHHQDLTLLKALVRQQLPEKYKEIFFDQSKNGYAGYIDGGASQEEFYKFIKPILEKMDGTEELLVKLNREDLLRKQRTFDNGSIPHQIHLGELHAILRRQEDFYPFLKDNREKIEKILTFRIPYYVGPLARGNSRFAWMTRKSEETITPWNFEEVVDKGASAQSFIERMTNFDKNLPNEKVLPKHSLLYEYFTVYNELTKVKYVTEGMRKPAFLSGEQKKAIVDLLFKTNRKVTVKQLKEDYFKKIECFDSVEISGVEDRFNASLGTYHDLLKIIKDKDFLDNEENEDILEDIVLTLTLFEDREMIEERLKTYAHLFDDKVMKQLKRRRYTGWGRLSRKLINGIRDKQSGKTILDFLKSDGFANRNFMQLIHDDSLTFKEDIQKAQVSGQGDSLHEHIANLAGSPAIKKGILQTVKVVDELVKVMGRHKPENIVIEMARENQTTQKGQKNSRERMKRIEEGIKELGSQILKEHPVENTQLQNEKLYLYYLQNGRDMYVDQELDINRLSDYDVDHIVPQSFLKDDSIDNKVLTRSDKNRGKSDNVPSEEVVKKMKNYWRQLLNAKLITQRKFDNLTKAERGGLSELDKAGFIKRQLVETRQITKHVAQILDSRMNTKYDENDKLIREVKVITLKSKLVSDFRKDFQFYKVREINNYHHAHDAYLNAVVGTALIKKYPKLESEFVYGDYKVYDVRKMIAKSEQEIGKATAKYFFYSNIMNFFKTEITLANGEIRKRPLIETNGETGEIVWDKGRDFATVRKVLSMPQVNIVKKTEVQTGGFSKESILPKRNSDKLIARKKDWDPKKYGGFDSPTVAYSVLVVAKVEKGKSKKLKSVKELLGITIMERSSFEKNPIDFLEAKGYKEVKKDLIIKLPKYSLFELENGRKRMLASAGELQKGNELALPSKYVNFLYLASHYEKLKGSPEDNEQKQLFVEQHKHYLDEIIEQISEFSKRVILADANLDKVLSAYNKHRDKPIREQAENIIHLFTLTNLGAPAAFKYFDTTIDRKRYTSTKEVLDATLIHQSITGLYETRIDLSQLGGDAYPYDVPDYASLGSGSPKKKRKVEDPKKKRKVD

SEQ ID NO: 272 - protein, 1368 aa, Artificial Sequence
  synthetic peptide sequence
MDKKYSIGLAIGTNSVGWAVITDDYKVPSKKLKGLGNTDRHGIKKNLIGALLFDSGETAEATRLKRTARRRYTRRKNRICYLQEIFSNEMAKVDDSFFHRLEESFLVEEDKKHERHPIFGNIVDEVAYHEKYPTIYHLRKKLADSTDKVDLRLIYLALAHMIKFRGHFLIEGDLNPDNSDVDKLFIQLVQTYNQLFEENPINASRVDAKAILSARLSKSRRLENLIAQLPGEKKNGLFGNLIALSLGLTPNFKSNFDLAEDAKLQLSKDTYDDDLDNLLAQIGDQYADLFLAAKNLSDATLLSDILRVNSEITKAPLSASMIKRYDEHHQDLTLLKALVRQQLPEKYKEIFFDQSKNGYAGYIDGGASQEEFYKFIKPILEKMDGTEELLAKLNREDLLRKQRTFDNGSIPYQIHLGELHAILRRQEDFYPFLKDNREKIEKILTFRIPYYVGPLARGNSRFAWMTRKSEETITPWNFEEVVDKGASAQSFIERMTNFDKNLPNEKVLPKHSLLYEYFTVYNELTKVKYVTEGMRKPAFLSGEQKKAIVDLLFKTNRKVTVKQLKEDYFKKIECFDSVEISGVEDRFNASLGTYHDLLKIIKDKDFLDNEENEDILEDIVLTLTLFEDREMIEERLKTYAHLFDDKVMKQLKRRRYTGWGRLSRKLINGIRDKQSGKTILDFLKSDGFANRNFMQLIHDDSLTFKEDIQKAQVSGQGDSLHEHIANLAGSPAIKKGILQTVKVVDELVKVMGRHKPENIVIEMARENQTTQKGQKNSRERMKRIEEGIKELGSDILKEYPVENTQLQNEKLYLYYLQNGRDMYVDQELDINRLSDYDVDHIVPQSFLKDDSIDNKVLTRSDKNRGKSDNVPSEEVVKKMKNYWRQLLNAKLITQRKFDNLTKAERGGLSELDKVGFIKRQLVETRQITKHVAQILDSRMNTKYDENDKLIREVRVITLKSKLVSDFRKDFQFYKVREINNYHHAHDAYLNAVVGTALIKKYPKLESEFVYGDYKVYDVRKMIAKSEQEIGKATAKYFFYSNIMNFFKTEITLANGEIRKRPLIETNGETGEIVWDKGRDFATVRKVLSMPQVNIVKKTEVQTGGFSKESILPKRNSDKLIARKKDWDPKKYGGFDSPTVAYSVLVVAKVEKGKSKKLKSVKELLGITIMERSSFEKDPIDFLEAKGYKEVRKDLIIKLPKYSLFELENGRKRMLASAGELQKGNELALPSKYVNFLYLASHYEKLKGSPEDNEQKQLFVEQHKHYLDEIIEQISEFSKRVILADANLDKVLSAYNKHRDKPIREQAENIIHLFTLTNLGAPAAFKYFDTTIDRKRYTSTKEVLDATLIHQSITGLYETRIDLSQLGGD

SEQ ID NO: 273 - protein, 1368 aa, Artificial Sequence
  synthetic peptide sequence
MDKKYSIGLDIGTNSVGWAVITDDYKVPSKKLKGLGNTDRHGIKKNLIGALLFDSGETAEATRLKRTARRRYTRRKNRICYLQEIFSNEMAKVDDSFFHRLEESFLVEEDKKHERHPIFGNIVDEVAYHEKYPTIYHLRKKLADSTDKVDLRLIYLALAHMIKFRGHFLIEGDLNPDNSDVDKLFIQLVQTYNQLFEENPINASRVDAKAILSARLSKSRRLENLIAQLPGEKKNGLFGNLIALSLGLTPNFKSNFDLAEDAKLQLSKDTYDDDLDNLLAQIGDQYADLFLAAKNLSDATLLSDILRVNSEITKAPLSASMIKRYDEHHQDLTLLKALVRQQLPEKYKEIFFDQSKNGYAGYIDGGASQEEFYKFIKPILEKMDGTEELLAKLNREDLLRKQRTFDNGSIPYQIHLGELHAILRRQEDFYPFLKDNREKIEKILTFRIPYYVGPLARGNSRFAWMTRKSEETITPWNFEEVVDKGASAQSFIERMTNFDKNLPNEKVLPKHSLLYEYFTVYNELTKVKYVTEGMRKPAFLSGEQKKAIVDLLFKTNRKVTVKQLKEDYFKKIECFDSVEISGVEDRFNASLGTYHDLLKIIKDKDFLDNEENEDILEDIVLTLTLFEDREMIEERLKTYAHLFDDKVMKQLKRRRYTGWGRLSRKLINGIRDKQSGKTILDFLKSDGFANRNFMQLIHDDSLTFKEDIQKAQVSGQGDSLHEHIANLAGSPAIKKGILQTVKVVDELVKVMGRHKPENIVIEMARENQTTQKGQKNSRERMKRIEEGIKELGSDILKEYPVENTQLQNEKLYLYYLQNGRDMYVDQELDINRLSDYDVDAIVPQSFLKDDSIDNKVLTRSDKNRGKSDNVPSEEVVKKMKNYWRQLLNAKLITQRKFDNLTKAERGGLSELDKVGFIKRQLVETRQITKHVAQILDSRMNTKYDENDKLIREVRVITLKSKLVSDFRKDFQFYKVREINNYHHAHDAYLNAVVGTALIKKYPKLESEFVYGDYKVYDVRKMIAKSEQEIGKATAKYFFYSNIMNFFKTEITLANGEIRKRPLIETNGETGEIVWDKGRDFATVRKVLSMPQVNIVKKTEVQTGGFSKESILPKRNSDKLIARKKDWDPKKYGGFDSPTVAYSVLVVAKVEKGKSKKLKSVKELLGITIMERSSFEKDPIDFLEAKGYKEVRKDLIIKLPKYSLFELENGRKRMLASAGELQKGNELALPSKYVNFLYLASHYEKLKGSPEDNEQKQLFVEQHKHYLDEIIEQISEFSKRVILADANLDKVLSAYNKHRDKPIREQAENIIHLFTLTNLGAPAAFKYFDTTIDRKRYTSTKEVLDATLIHQSITGLYETRIDLSQLGGD

SEQ ID NO: 274 - protein, 1368 aa, Artificial Sequence
  synthetic peptide sequence
MDKKYSIGLAIGTNSVGWAVITDDYKVPSKKLKGLGNTDRHGIKKNLIGALLFDSGETAEATRLKRTARRRYTRRKNRICYLQEIFSNEMAKVDDSFFHRLEESFLVEEDKKHERHPIFGNIVDEVAYHEKYPTIYHLRKKLADSTDKVDLRLIYLALAHMIKFRGHFLIEGDLNPDNSDVDKLFIQLVQTYNQLFEENPINASRVDAKAILSARLSKSRRLENLIAQLPGEKKNGLFGNLIALSLGLTPNFKSNFDLAEDAKLQLSKDTYDDDLDNLLAQIGDQYADLFLAAKNLSDATLLSDILRVNSEITKAPLSASMIKRYDEHHQDLTLLKALVRQQLPEKYKEIFFDQSKNGYAGYIDGGASQEEFYKFIKPILEKMDGTEELLAKLNREDLLRKQRTFDNGSIPYQIHLGELHAILRRQEDFYPFLKDNREKIEKILTFRIPYYVGPLARGNSRFAWMTRKSEETITPWNFEEVVDKGASAQSFIERMTNFDKNLPNEKVLPKHSLLYEYFTVYNELTKVKYVTEGMRKPAFLSGEQKKAIVDLLFKTNRKVTVKQLKEDYFKKIECFDSVEISGVEDRFNASLGTYHDLLKIIKDKDFLDNEENEDILEDIVLTLTLFEDREMIEERLKTYAHLFDDKVMKQLKRRRYTGWGRLSRKLINGIRDKQSGKTILDFLKSDGFANRNFMQLIHDDSLTFKEDIQKAQVSGQGDSLHEHIANLAGSPAIKKGILQTVKVVDELVKVMGRHKPENIVIEMARENQTTQKGQKNSRERMKRIEEGIKELGSDILKEYPVENTQLQNEKLYLYYLQNGRDMYVDQELDINRLSDYDVDAIVPQSFLKDDSIDNKVLTRSDKNRGKSDNVPSEEVVKKMKNYWRQLLNAKLITQRKFDNLTKAERGGLSELDKVGFIKRQLVETRQITKHVAQILDSRMNTKYDENDKLIREVRVITLKSKLVSDFRKDFQFYKVREINNYHHAHDAYLNAVVGTALIKKYPKLESEFVYGDYKVYDVRKMIAKSEQEIGKATAKYFFYSNIMNFFKTEITLANGEIRKRPLIETNGETGEIVWDKGRDFATVRKVLSMPQVNIVKKTEVQTGGFSKESILPKRNSDKLIARKKDWDPKKYGGFDSPTVAYSVLVVAKVEKGKSKKLKSVKELLGITIMERSSFEKDPIDFLEAKGYKEVRKDLIIKLPKYSLFELENGRKRMLASAGELQKGNELALPSKYVNFLYLASHYEKLKGSPEDNEQKQLFVEQHKHYLDEIIEQISEFSKRVILADANLDKVLSAYNKHRDKPIREQAENIIHLFTLTNLGAPAAFKYFDTTIDRKRYTSTKEVLDATLIHQSITGLYETRIDLSQLGGD

SEQ ID NO: 275 - protein, 240 aa, Acetobacter aceti
MANIAENLVFGIDLGIGSCGWAVLNQKAKDENIVALGSWCFDVPETDKERIPTNQIRRANRLLRRVIRRRRNRMAEIRRLFASKGMLDTADPDALAKISADPWEMRAKGLDYQLTPQEFAVALGHIAKRRGFKSAAKRVSTNAPSEDSKMLAALEKTKEQSAQYRTIGEMFARDPAYADRRRNRDGCFDRTMSREDLFKETQILFESQRRLGNFSATSETEQAFIDIAFRQKPMQDSERL

SEQ ID NO: 276 - protein, 400 aa, Acetobacter aceti
SFERFRLLCRLVNLRVTDGLEDRPLTPEELRLACEDAGKTRKLSVKKVRSLIGLRDDQRFTTIPPDQEQHDIAARTGDALTGTATFRAILGESFWRQLLPHPEQLDRAAWIISFHELTDTIISKLATIGLPSEVMELIRKALEDGKFSKFKGAASLSDKAARKLIPFLQEGLTYDKACQKAGYNHAASKFTHYDSIDTKAKFNSLMDDVRDSITNPVARKAISEGMKQVWAMRNQWGLPGAICIELARDVGNSAEKRREIESGIKKNTAQRERERQEAKEHLNQSDISSETLLRYRLWKEQGGRCCYTDQPITPSQLIASDNSVQVDHILPWSRFGDDSYLNKALCTAKANQEKKNRTPWEWIHNQKGVEAWNHFTAAVESRKETRGLKKRNFLLKSSKE

SEQ ID NO: 277 - protein, 376 aa, Acetobacter aceti
YAARVMAEAVRLLYPSGNRAEKGGVKRVFTRPGALTAALRHAWGVESLKKINGKRLNDDRHHALDAAVVAAVSEKEIQKLTKSFQICEQKGLARPMRDVPMPWEGFRHQLETAYADIRVARPERRRARGKGHDATIRQLREEKDGPVVYERRAISDLKLTDLERIKDPERNSAIISSLRTWIEKGKPADYPPQSPKGDEIRKIRVMSRNKPAVSVRGGTADRGEMTRVDVFTKMGKKGKPEWFLVPIYRHQVIDRIQWPQPPNQAAANGKSEKNWPTMGLEHEFRFSLYPRSYVQIVKRDGEIIEGYFAGLDRTVAAFSLLSSSDPTSIQRGIGAKTLESIRKYNVNRFGDISMVEQETRTWHGDVCISPDQPDSA

SEQ ID NO: 278 - protein, 1054 aa, Actinobacillus suis
MKLTPLNYILGLDLGIASVGWAVVEIDEQENPLGLIDVGVRTFDRAEVPKTGESLALARRLARSARRLVKRRADRIKKAKRLLKAENILLSADEHLPNDVWQLRVKGLDQKLERQEWAAVLLHLLKHRGYLSQRKNESKSENKELGALLSGVETNHQILQSAEYRTPAEIAVKKFHVEDGHIRNQRGAYTHTFSRLDLLAEMELLFQRQTDLGNPHTSAKLLENLTALLMWQKPALAGEAILKMLGKCTFEPTEYKAAKNSYSAERFVWLTKLNNLRILEQGAERALTDNERFALLDQPYEKAKFTYAQARTMLALPDEAIFKGVRYQGEDKKAVETKTILMEMKAYHQIRKALENADLKAEWNELKNNSELLDDIGTAFSLHKTDEDICRYLDGKLSESILNALLENLNFDKFIQLSLKALQQILPLMLQGQRYDEAVSAIYGDHYGKKSAEINRLLPTIPADEIRNPVVLRTLTQARKVINAVVRLYGSPARIHIETGREVGKSYQDRKKLEKQQEDNRKQRESAVKKFKEYFPNFVGEPKGKDILKMRLYELQQAKCLYSGKSLELHRLLEKGYVEVDHALPFSRTWDDSFNNKVLVLANENQNKGNLTPYEWLDGKNNSEHWQNFVARVQTSGFSHTKKQRILSHKLDEKGFIERNLNDTRYVARFLCNFIADNMLLTGKGKRKVFASNGQITALLRGRWGLQKVRDDNDRHHALDAVVVACSTVVMQQKITRFVRYEEGNVFSGERIDRETGEIIPLHFPSPWAFFRENVEIRIFSENPKLELENRLPDYPQYNHEFVQPLFVSRMPTRKMTGQGHMETVKSAKRLDEGLSVLKVPLTQLKLSDLERMVNREREVTLYESLKARLEQFGNDPAKAFAEPFHKKGGAVVKAVRVEQTQKSGVLVRDGNGVADNASMVRVDVFTKGGKYFLVPIYTWQVAKGILPNKAVTANVDEIDWLEMDESYQFIFTMYPNDLVKVKLKKEEFFGYYGGLDRATGAIVIKEHDLEKSKGKQGIYRIGVKLALSFEKYQVDELGKNIRPCRPTKRQHVR

SEQ ID NO: 279 - protein, 239 aa, Actinobacillus ureae
MEIRIFSENPKLGLENRLPGYPQYNHEFVQPLFVSRMPTRKMTGKGHMETVKSAKRLDEGLSVLKVPLTQLKLSDLERMVNREREDALYQSLKAHLEQFGNDPAKAFAEPFHKKGGTVVKAVRVEQTQKSGVLVRDGNGVADNTSMVRVDVFTKAGKYFLVPIYKWQVAKRILPNKAVTAGVDEIDWLEMDSSYQFIFTMYANDLVKVKLKKRSILGLLRWFRSCNWGYCYQRTRFREI

SEQ ID NO: 280 - protein, 400 aa, Actinobacillus ureae
MKLTPLNYILGLDLGIASVGWAVVEIDEQENPLGLIDVGVRTFDRAEVAKTGESLALARRLARSSRRLVKRRADRIKKAKRLLKAENLLLSADEILPNDVWQLRVKGLDQKLERQEWAAVLLHILKHRGYLSQRKNESKSENKELGALLSGVATNHQLLQTAEYRTPAEITVKKFQAEENGHGHIRNQRGDYSHTFDRKDLLAEMKLLFQRQAELGNPHTSEKLLENLTTLLLWQKPALAGEAILKMLGKCTFEPAEYKAAKNSYSAERFVWLTKLNNLRILENGIERALTDNERFTLLDQPYEKAKLTYAQARTMLALSDEAIFKGVRYQGEDKKAAEKVALIEMKGYQHIRKALEGAGLKAEWNELKNNSELLDDIGTAFSLYFSISNLPTEIAYFTP

SEQ ID NO: 281 - protein, 1113 aa, Actinomyces georgiae
MSASSQNVERIRYKVGIDVGLRSIGFCAVQVDADDRPVKLLNTVVHVHDAGVSPADAKKADTRKLVSGVARRTRRLYRTRKRRLVDLDRQLDGLGWPLVDPARFADPREPWFAREKLVSGRVDDADERKELLSVALRHIAHHRGWRNPYSTVESLQADAPPSEFLQGLNQRVSEKLGTELDPGLTQGQLVAKLLHRFPNAKIRGPEGILRGKLHQSDNAGELRLICRTQGLDCHITEELVRLVFQAKSPKANKEMRKRIGRDQLPGQGAHIRAEKAHPVFQRFRIVAVLANLRIREAHVDRRLTAEEMRTLTDFLLGLAGSEQPTWEELADNLNIERHQLRGTAKASVDGAPALRFPPIDATTDRIYASKLKWLAEWWRQADEERRGYMVDALSNSGGSEDEPYLDDEIAEMLEQASEEDQAKLDSLHLPGGRASYCLDTLRRLTDAMLGGGLDLFEARKAVFHVDDDWAPPTDPIGAPVGNPPVDRVLKHVARWLEAATGRWGAPQTINIEHVREGLGSEKAARELTRMNDRRRRNNQKLVEEMGEKLGMSGRIRRSDRMRYEAIRRQNCECLYCGQPITYQTMEMDHIVPRAGAASTNSRSNLAAVCRRCNHQKGKLPFAVWAESQDSPAEVRLQDAVQRVRHWLRDAGMGQKELQALRVQVIARLKSKRPDEEFDGRSMESIAWMANELRARVEAQYRGSGTTVRVYRGALTAEARKASGFEGRVNLIGGRGKDRFDRRHHAMDALVIALMNQSVAQTLALRLNMRDSQWLTQSEQTWRQFHGAPGEAARKWEAWDRDMRDASDLFNLALDGGRIPITENVRLRVGNGRVHEDGVIRFKPEYEVKGKTIKGGEARLLGDSLPSEQIDRAETPALWTALTRLPEYDRKSGLPENPDRVIRVNGAVVQATDRIRFFGTPASVAVRGGYAKLGESIHHARIYRINGKTPKYAMIRVYTIDLMRLNHEDIFTAVLKPSTISMRCAEKKLKYAIAEGNAEQIGWLVEGDQLELDAAAYAKGVGADLMREYPMATCWRVAGFPDEAKLRLRPVLLAAEGMGEDAPKFMREVLENQGWRPAVNALLSPGSVRVVRRNVLGEPRFKSSGHLPTTVDLV

SEQ ID NO: 282 - protein, 1101 aa, Actinomyces naeslundii
MWYASLMSAHHLRVGIDVGTHSVGLATLRVDDHGTPIELLSALSHIHDSGVGKEGKKDHDTRKKLSGIARRARRLLHHRRTQLQQLDEVLRDLGFPIPTPGEFLDLNEQTDPYRVWRVRARLVEEKLPEELRGPAISMAVRHIARHRGWRNPYSKVESLLSPAEESPFMKALRERILATTGEVLDDGITPGQAMAQVALTHNISMRGPEGILGKLHQSDNANEIRKICARQGVSPDVCKQLLRAVFKADSPRGSAVSRVAPDPLPGQGSFRRAPKCDPEFQRFRIISIVANLRISETKGENRPLTADERRHVVTFLTEDSQADLTWVDVAEKLGVHRRDLRGTAVHTDDGERSAARPPIDATDRIMRQTKISSLKTWWEEADSEQRGAMIRYLYEDPTDSECAEIIAELPEEDQAKLDSLHLPAGRAAYSRESLTALSDHMLATTDDLHEARKRLFGVDDSWAPPAEAINAPVGNPSVDRTLKIVGRYLSAVESMWGTPEVIHVEHVRDGFTSERMADERDKANRRRYNDNQEAMKKIQRDYGKEGYISRGDIVRLDALELQGCACLYCGTTIGYHTCQLDHIVPQAGPGSNNRRGNLVAVCERCNRSKSNTPFAVWAQKCGIPHVGVKEAIGRVRGWRKQTPNTSSEDLTRLKKEVIARLRRTQEDPEIDERSMESVAWMANELHHRIAAAYPETTVMVYRGSITAAARKAAGIDSRINLIGEKGRKDRIDRRHHAVDASVVALMEASVAKTLAERSSLRGEQRLTGKEQTWKQYTGSTVGAREHFEMWRGHMLHLTELFNERLAEDKVYVTQNIRLRLSDGNAHTVNPSKLVSHRLGDGLTVQQIDRACTPALWCALTREKDFDEKNGLPAREDRAIRVHGHEIKSSDYIQVFSKRKKTDSDRDETPFGAIAVRGGFVEIGPSIHHARIYRVEGKKPVYAMLRVFTHDLLSQRHGDLFSAVIPPQSISMRCAEPKLRKAITTGNATYLGWVVVGDELEINVDSFTKYAIGRFLEDFPNTTRWRICGYDTNSKLTLKPIVLAAEGLENPSSAVNEIVELKGWRVAINVLTKVHPTVVRRDALGRPRYSSRSNLPTSWTIE

SEQ ID NO: 283 - protein, 1181 aa, Actinomyces sp.
MLHCIAVIRVPPSEEPGFFETHADSCALCHHGCMTYAANDKAIRYRVGIDVGLRSIGFCAVEVDDEDHPIRILNSVVHVHDAGTGGPGETESLRKRSGVAARARRRGRAEKQRLKKLDVLLEELGWGVSSNELLDSHAPWHIRKRLVSEYIEDETERRQCLSVAMAHIARHRGWRNSFSKVDTLLLEQAPSDRMQGLKERVEDRTGLQFSEEVTQGELVATLLEHDGDVTIRGFVRKGGKATKVHGVLEGKYMQSDLVAELRQICRTQRVSETTFEKLVLSIFHSKEPAPSAARQRERVGLDELQLALDPAAKQPRAERAHPAFQKFKVVATLANMRIREQSAGERSLTSEELNRVARYLLNHTESESPTWDDVARKLEVPRHRLRGSSRASLETGGGLTYPPVDDTTVRVMSAEVDWLADWWDCANDESRGHMIDAISNGCGSEPDDVEDEEVNELISSATAEDMLKLELLAKKLPSGRVAYSLKTLREVTAAILETGDDLSQAITRLYGVDPGWVPTPAPIEAPVGNPSVDRVLKQVARWLKFASKRWGVPQTVNIEHTREGLKSASLLEEERERWERFEARREIRQKEMYKRLGISGPFRRSDQVRYEILDLQDCACLYCGNEINFQTFEVDHIIPRVDASSDSRRTNLAAVCHSCNSAKGGLAFGQWVKRGDCPSGVSLENAIKRVRSWSKDRLGLTEKAMGKRKSEVISRLKTEMPYEEFDGRSMESVAWMAIELKKRIEGYFNSDRPEGCAAVQVNAYSGRLTACARRAAHVDKRVRLIRLKGDDGHHKNRFDRRNHAMDALVIALMTPAIARTIAVREDRREAQQLTRAFESWKNFLGSEERMQDRWESWIGDVEYACDRLNELIDADKIPVTENLRLRNSGKLHADQPESLKKARRGSKRPRPQRYVLGDALPADVINRVTDPGLWTALVRAPGFDSQLGLPADLNRGLKLRGKRISADFPIDYFPTDSPALAVQGGYVGLEFHHARLYRIIGPKEKVKYALLRVCAIDLCGIDCDDLFEVELKPSSISMRTADAKLKEAMGNGSAKQIGWLVLGDEIQIDPTKFPKQSIGKFLKECGPVSSWRVSALDTPSKITLKPRLLSNEPLLKTSRVGGHESDLVVAECVEKIMKKTGWVVEINALCQSGLIRVIRRNALGEVRTSPKSGLPISLNLR

SEQ ID NO: 284 - protein, 1120 aa, Actinomyces sp.
MNAMKQYNAGIDVGINSVGFAAIEVDSKGLPLNILNNMVVLHDSGVDPGTAKTGATRLANSGTARRTRKLIARRRKRLQKLDRYIEVQGWPLVDFSSLPDPYTPWKIRAKLTQDRLEGEEQGRGLSIALRHMARHRGWRNPYEGVESLHSPKEASKQFKDLKDRVTKVSGVIFDEDATPAEVVCDIGLSPKQRLRSAPSAKYKEGATLADEPVGGKSKEGLLGGKLMQSDNANELRKIGIVQGLSNEKVNEIIDQVFASESPKGQAGKRAKKDELPGQEQYVRALRAHLAFQRFRIVAAVANLRILEAEPKHERLLSQSEKDKVIEFLMSADGDDGVTWSDVAEELGIERECLSGTAKRGADGERPSSFPPTNSTNISIVRSKVKPLIEWWRKASDDEQATLVTALSNADELTDDQPSAETVRQFLSSPDEQSQEKIDKISLPKGRAAYSVNSLERLTRRMLKDSVDLFEARKREFGVDNNWTPTPDSIGEPVGNPAVDRVLKIVNRWLLAVTRKWGPPKVVNIEHVRVGFTSAAQTRKYEEENKTNRERNLAILEELRDKFGTSGKIRREDITRFAALRRQNCQCAYCGEAITFFDCEMDHIVPRKGPGSTNTRNNLVAICERCNKSKSNMPFSLWAQNCDIPGVSVEAVIDRVRTWIKDPELNPKQYNNFKKDVIERLRKTVDDDAIDNRSIESVAWMATELADRIGSHFRTAGANTKVRVYRGWLTSEARKASGFEGKINLIGGRGKTRLDRRHHAMDAATIALMRQSVAQTLVERASIRESDRLRRVVSSSWKDYRGADRDKQFSYGSWLNSMNALAELFNRAIDADGIPVTQNLRLRLGNGEAHDATIRSLEKKRVGASWTIGEIDRASTPQLWLALTRQEDFDQNDGLPANASRELRVKNHWFHAEENVTLFPTKSAAIAVRGGYAEIGNTIHHARLYKLPGKKLTYGMIRVFAIDLLCAWHTDLFSSPLLPESISLRTAETKVRRAVEDGAAMYIGWLVDGDEIVLDPETKAFKSNKIGEYLCEFPGTKRWKVDGFPDKEKLRLRPLQLAGEGLPEDVSAGTEEILGPKGNGWRVAINALFKSSQLVVVRRTALGMVRKLSRRHLPLTTRLRG

SEQ ID NO: 285 - protein, 1095 aa, Actinomyces sp.
MPAHHLRVGIDVGTHSVGLATLRVDDQGTPIELLSALSHIHDSGIGKEGQKDHDTRKKLSGVARRTRHLLRNRRERLQQLDKVLVDLGFPIPKPEEYPDLSERTDPYRVWRVRARLVEETLPEELRGPAISMAVRHIARHRGWRNPYSKVESLLSPAEESSFMKALRKRIMTKTGEVLDDDITPGQAMAQVALTHKIYMRGPEGILGKLHQSDNANEIRKICARQGISSDVCKQLLRAVFKAESPRGSAVSRVAPDPLPGQGSFRRAPKCDPEFQRFRIISIVANLRISETKGENRPLTVDERRQVVAFLMEDSQADLTWVDVAEKLRVSRQALRGTAMLTADGERSAAQPPIDVTDQIMRKTKISALKTWWDKADAERRGAMVRYLYEGLEDSECAEVIAKLPEKDHAKLDSLHLPAGRAAYSRESLTALSDHMLETTNDLHEARKRLFGVDDSWAPPAEPVGAPVGNPSVDRTLKIVARYLSAVESIWGTPEVIHVEHVRDGFTSERTAEERDKANRSRHNDNQKAIEKIQHDYGKEGYISRGDIVRFHALKLQGSACLYCGTTIGYHTCQLDHIVPQAGPGSNNRRGNLVAVCERCNHSKSNTPFAVWAQKCGIPHVGVKEAISRVNGWVEHNHSTSSGDLTRLKKEVIARLRRTQKDPEIDERSMESVAWMANELHHRIAAAYPETTVMVYRGSITAAARKAASIESRINLIGEKGRKDRLDRRHHAVDASVVALMEPSVAKTLAERSSLRGEQRLTGQEQTWKQYTGLTVGARERFEAWRGHMHRLTELFNESLAADEVYVTQNIRLRLSDGSAHTVKASKLVSHRLGDGLTVQQIDRACTPALWCALTREIDFDEKNGLPAREDRVIRVHGQEISSADCIQVFSKRKKTKSDRDEAPFGAIAVRGGFVEIGSSIHHARIYRIEGEKPAYAMLRVFTHDLLSQRHGDLFSAVIPPQSISMRCAATELRQAISEGRATYLGWIVSGDELHIPVETFTTHKIGSFLKDYPNTTRWRICGYDSETMLILKPRILSAEGLNNSSDIAEYVIKNKGWRVAINKLAKVHPTVVRRDALGRPRHSSRSNLPVTWSIE

SEQ ID NO: 286 - protein, 1144 aa, Actinomyces sp.
MSMIDSSENVPGIRYRVGIDVGLKSIGFCAVEVDRNDQPVRMLNSMVFIHDAGVDPNENKAAKSRKLTAGVARRTRRLYRTRHQRLVNLDRVLSKEFGWPLPDLTSFKDPREPWHVRAGLLEGYIADDEKRKEALSIALRHIARHRGWRNPYAKVETLLQPSEPSDFLKGLNDRISEELGRAFPADATPGQLVDTYLAHPDYVGRAGTPKLRGPQGILAGKLHQSDNAQEIRGICDVQRIEPAERDRLIRVVFEAKSPKGSAKERGLVGYDELPGQGRHVRAEKAHPAFQLFRMVSVLANLRIREGREERPLTPDELEDLVDFINQVSLKQEVTWQDLADKLRIERADLRGTAKASFDGSPVLRNPPTDVTTEKIMACKVKWLKEWWKEADDEQRGYMVDAFSNSGGSEDGTDVNDEVAELLEQATEDDQLEFEKISLPQGRAAYSLDSLRRLTDRMLRDGVDLHTARRLEFNVGDDWKPAVEPIGAPTGNPAVDRVLKQVSRWLHAATERWGEPTVINIEHARDGLGSERVARELMRENEKRRKANASAVAEMAAKLKLSGKVHRSDQIRYFALQRQNCQCLYCGAPITYTTAEMDHIVPRADGSSTNDRSNLAAVCRTCNHMKGKIPFAVWASSDKANQGVSLTGALERVNMWQRDSGMSPRQLKQLQREVCARLKSKKPDQEFDGRSMESVAWMAVELRTRIEGFYRSRDEESVPSVGVYRGQLTAEARRASGFESRVNLIGGRGKTRFDRRHHAMDALVIALMNPSVSRTLALRLNMRDAQRLTGVEETWKHFYGKPGEASKRFESWRESMLRGVELFNIALSDNAIPFVENIRLRVGSSVIHDATVHSFCPPKTPDGKQIITKGYGEQHSLGSAMPVELIDRAETPALWTALTRCPDFDPKKGLPENPQRTISVNGTRVGPTELVNFFEFSKSGPKACLKVRGGYVDLSGAIHHARIYRIAGKKTAYAMIRVFQVDLLRLKDHDVFTTPLKPSTISMRTAEPKIREALANGTATQIGWLVEGDELVIDTSKYSGGFIGEVLARYPEATSWRVAGFMTPAKLRIKPILLSKEGFVDETQAALLGVEVTSEAIQKTVDRPGWLPAVNVLFGAGGVRVIRRNCLGEERYHSSASLPVSMTLE

SEQ ID NO: 287 - protein, 1103 aa, Actinomyces sp.
MTKINDDLRYRVGIDVGLKSIGFCAVEVDENDQPLRLLNSMVFVHDAGVDPNENKAAKSRKLTAGVARRTQRGTAQNRRRLAELDRALSEELNWPLPNLEDFEDSYEPWHTRAELVEHYIKDDAERAEALAIAIRHIARHRGWRNPYLSVDSLLTPQEPSKFLRGLNERVTQALGREFPADATPGQLICAYIDSPKYAETQGIRGDSGILSGKLHQFDNVGEIRKICEVQRLDHDVFKLLVRKVFFAKSPRGSAAGLVGHDQIPGQGKYIRAEKAHPDFQLFRIVAVLTNLRIREGKAERCLTPDELRGLVDYILEVQLKQQVTWADLADNLGIERTDLRGTARASFDGSPALRFPPTDVTAEKIMASKVKWLKDWWDKADSERRGFMVDALSNSGGSTGDNDIDDEVAALLEAATEDEQAELEKIQLPQGRAAYSLDSLRRLTKRMLEEGVDLHTARKEEFNVDDDWRPEPEPIEAPVGNPAVDRVLKQVARWLNMATDRWGVPDVINIEHTRDGLGSEKVARELLRESQKRQDLNQKDMDKMIRELGISGKARRSSLIKYQAIQRQNSMCLYCGTEIGFETAEMDHIVPRALSGSTNDRSNLAAVCRACNHQKGAVPFAVWATSGEAHAGVSLEDAIKRVRLWQKGPGMSPKQHKAFQNEVISRLKSRKPDEEFDGRSMESVAWMAVELRTRIDGYYRKVNSDSVPKVGIYRGQLTAEARKASGFENRVNLIGGKGKTRFDRRHHAMDALVIAMMNQSVSQTLALRVNMRESQRITGQEETWKNFYGKPGQASERFEKWREGMLRAVELFNIELAKNAIPFHENVRLRVGSSKVHDDTVRKFIHAKLGEALSVAMIDCAETPALWTALTRLPDFDPKDGLPEDLSREIYIHSRKITADEQLNFFNSPSACLKVRGGYVEIGSSIHHARVYRIDGKKTTYSMVRVFATDLVKMTHEDVFTTPLKPSTISMRTADPKIRKALADGTATQIGWLVEGDELQLETDKYSGGLIGEVLAEYPQLTSWRVAGFYGVTQLRLRPYMLAAEGIPSDASESLRKVIEGKGWLPAINALLSSGCVKVVRRNCLGEPRFNAKSSLPVSQLLR

SEQ ID NO: 288 - protein, 1114 aa, Actinomyces turicensis
MQFHFYMVYVTMKGMNDKDASQQLRYRVGIDVGTHSIGFCAVEVDESGMPIQLLNSMVHKHDSGIDPGGNDTATTRLAEAGVARRTRRLIRRRKKRLQELDAFIEECGWPLVDLATITDARSPWRIRAHLATEHIDDEAEQGKLLSIALRHMARHRGWRSPYARISSLHIQADPSEQLKALAQRVSEKTGISLTADQTPAQLISVYLDVFETGKLRGPEGILGGKLMQSDNANELRRIATVQGLDNDLLKKIIGFVFAAESPKGSAAKRVGKDVLPGAHGLRAEKAHPAFQQFRIVSIVQNLRIKEGTGLRALTSEETEIVVDFLNQAGLTEAPTWEEVADNLEIPRSHLKGTATEGFDGIAPSTRPPFDVTSQKILNGKLKKLSAWWKDADYDHRCAMVNALSNVGSDDEGSLADDDVREFLSDFTDEELEALDKVELPGGRAAYSVDSLEKLTNTMLSEGCDLHSARKIAFGVDDSWTPPAEPIGQPVGNPAVDRVLKQVARWISAATNQWGTPESVNIEHVRDALGSEKASREYQRSLQTRRIRNEKLFAEMRERLDIGGKPRRSELTRYLALQRQNCQCLYCGMPITYTDAEMDHIVPRKGAASTNTRENFAAVCRACNHQKSNLPFAVWAEKTERPGVSVKEAYKRVSDMRIEPGMNGRQMNEFRKAIRLRLTTKHADAEIDGRSLESVAWMANELRHRIEGFYRSAENDVTVRVFRGAVTAEGRRASGFESRVNLIGGKGKTRLDRRHHAMDALTIALMEPGIAQTIALRMNMRESQRVLGEQETWKSFTGGSDTARKRWEHWCEEMLRASELFNVFLAEDRIPICQNKRLRLGSSAVHKAIVQPFEASDKRIVSDAMPVELIDRASTPALWTALTRDPDFDPKEGLPANPSRTIRLHDKRLGPNETVEFFPTAAACLAIRGGYCEIGAGIHHARIFRISGKKTTYAMLRVYQCDLVRFQKENLLTVELPANTISVRTAVPKLREALAHGTAEQIGWLVVGDELKIDLSGFTTGQIETFNETYPQATRWEVTGFPTKTQLRLKPLLIASEGLADDVPDDIVKIVKGPGWWPAIDKLLKIGNVVLYRRDTHGKPRVVSHRSLPLSSKLQ

SEQ ID NO: 289 - protein, 1113 aa, Alcanivorax sp.
MRYRVGLDLGTASVGAAVFSMDEQGNPMELIWHYERLFSEPLVPDMGQLKPKKAARRLARQQRRQIDRRASRLRRIAIVSRRLGIAPGRNDSGVHGNDVPTLRAMAVNERIELGQLRAVLLRMGKKRGYGGTFKAVRKVGEAGEVASGASRLEEEMVALASVQNKDSVTVGEYLAARVEHGLPSKLKVAANNEYYAPEYALFRQYLGLPAIKGRPDCLPNMYALRHQIEHEFERIWATQSQFHDVMKDHGVKEEIRNAIFFQRPLKSPADKVGRCSLQTNLPRAPRAQIAAQNFRIEKQMADLRWGMGRRAEMLNDHQKAVIRELLNQQKELSFRKIYKELERAGCPGPEGKGLNMDRAALGGRDDLSGNTTLAAWRKLGLEDRWQELDEVTQIQVINFLADLGSPEQLDTDDWSCRFMGKNGRPRNFSDEFVAFMNELRMTDGFDRLSKMGFEGGRSSYSIKALKALTEWMIAPHWRETPETHRVDEEAAIRECYPESLATPAQGGRQSKLEPPPLTGNEVVDVALRQVRHTINMMIDDLGSVPAQIVVEMAREMKGGVTRRNDIEKQNKRFASERKKAAQSIEENGKTPTPARILRYQLWIEQGHQCPYCESNISLEQALSGAYTNFEHILPRTLTQIGRKRSELVLAHRECNDEKGNRTPYQAFGHDDRRWRIVEQRANALPKKSSRKTRLLLLKDFEGEALTDESIDEFADRQLHESSWLAKVTTQWLSSLGSDVYVSRGSLTAELRRRWGLDTVIPQVRFESGMPVVDEEGAEITPEEFEKFRLQWEGHRVTREMRTDRRPDKRIDHRHHLVDAIVTALTSRSLYQQYAKAWKVADEKQRHGRVDVKVELPMPILTIRDIALEAVRSVRISHKPDRYPDGRFFEATAYGIAQRLDERSGEKVDWLVSRKSLTDLAPEKKSIDVDKVRANISRIVGEAIRLHISNIFEKRVSKGMTPQQALREPIEFQGNILRKVRCFYSKADDCVRIEHSSRRGHHYKMLLNDGFAYMEVPCKEGILYGVPNLVRPSEAVGIKRAPESGDFIRFYKGDTVKNIKTGRVYTIKQILGDGGGKLILTPVTETKPADLLSAKWGRLKVGGRNIHLLRLCAE

SEQ ID NO: 290 - protein, 1146 aa, Alicyclobacillus hesperidum
MAYRLGLDIGITSVGWAVVALEKDESGLKPVRIQDLGVRIFDKAEDSKTGASLALPRREARSARRRTRRRRHRLWRVKRLLEQHGILSMEQIEALYAQRTSSPDVYALRVAGLDRCLIAEEIARVLIHIAHRRGFQSNRKSEIKDSDAGKLLKAVQENENLMQSKGYRTVAEMLVSEATKTDAEGKLVHGKKHGYVSNVRNKAGEYRHTVSRQAIVDEVRKIFAAQRALGNDVMSEELEDSYLKILCSQRNFDDGPGGDSPYGHGSVSPDGVRQSIYERMVGSCTFETGEKRAPRSSYSFERFQLLTKVVNLRIYRQQEDGGRYPCELTQTERARVIDCAYEQTKITYGKLRKLLDMKDTESFAGLTYGLNRSRNKTEDTVFVEMKFYHEVRKALQRAGVFIQDLSIETLDQIGWILSVWKSDDNRRKKLSTLGLSDNVIEELLPLNGSKFGHLSLKAIRKILPFLEDGYSYDVACELAGYQFQGKTEYVKQRLLPPLGEGEVTNPVVRRALSQAIKVVNAVIRKHGSPESIHIELARELSKNLDERRKIEKAQKENQKNNEQIKDEIREILGSAHVTGRDIVKYKLFKQQQEFCMYSGEKLDVTRLFEPGYAEVDHIIPYGISFDDSYDNKVLVKTEQNRQKGNRTPLEYLRDKPEQKAKFIALVESIPLSQKKKNHLLMDKRAIDLEQEGFRERNLSDTRYITRALMNHIQAWLLFDETASTRSKRVVCVNGAVTAYMRARWGLTKDRDAGDKHHAADAVVVACIGDSLIQRVTKYDKFKRNALADRNRYVQQVSKSEGITQYVDKETGEVFTWESFDERKFLPNEPLEPWPFFRDELLARLSDDPSKNIRAIGLLTYSETEQIDPIFVSRMPTRKVTGAAHKETIRSPRIVKVDDNKGTEIQVVVSKVALTELKLTKDGEIKDYFRPEDDPRLYNTLRERLVQFGGDAKAAFKEPVYKISKDGSVRTPVRKVKIQEKLTLGVPVHGGRGIAENGGMVRIDVFAKGGKYYFVPIYVADVLKRELPNRLATAHKPYSEWRVVDDSYQFKFSLYPNDAVMIKPSREVDITYKDRKEPVGCRIMYFVSANIASASISLRTHDNSGELEGLGIQGLEVFEKYVVGPLGDTHPVYKERRMPFRVERKMN

SEQ ID NO: 291 - protein, 1552 aa, Anaerophaga sp.
MFSQRNNPYCELLQNVKQLYKEKFGKTNQVDNSIIYGFMKRILGLDLGTNSIGWALVENDENDRKGKIIGMGSRIIPMDMSELDNFNKGASISKTAERTRLRMTRRLRERHLLRRARLHRILNIMGFLPEHYRNSIDFIDKKGCFFEGQEPKIAYKPDKNSEQFCFLFTSSFHEMLEDFRKFQPELIQNRKKVPYDWTIYYLRKKALTQKISKEELAWIILNFNTKRGYYHLRGEDEDNQDNKKIKEFRALKVVNVTEREGANSSGKKWYDMELENGWVYSRQSNLPPNLEGKTIELIVSYTLDNNGNIKKDKNGKEKYSLSMPGEEDWNLVKIKTENDLKTSKKSVGEYIYDHLLKNPDQKIRGKLISTIERKFYKEELSRILKTQMNFYEELKNRELYQKCVEELYPNNKSHQQTLLQKDFIHLIVEDIIFYQRPLKSKRAFVNNCPLEYRVYVDKKSGELIKSGVKCIPKSHPLFQEFRLWQYVRNLRIYERERMVNGRLMVNVDVTNELLPDEEHIVRLFDLLNDRKSFKQDDVLRFVGIKSPKDRKRYSWNYPEDKELPGNETRHLILAWLKKVDGVPEDWLDPEKLKALWHLLYSVTDREEIIKGLHSFAKKYELPDTFVEHFKKIPRLEREYGSFSEKAIKKLLPLMRMGKYWKAEEIPADLLEKAQKIIDAEADDRISDEVREKLLHLKDISQLKGLPLWQASYLVYGRHSETGEVVKWRTSEDLEKYILQFKQHSLRNPVVEQVILEALRVVKDIWEHYGEGKEGFFNEIHVEIGRELKNPADKRKKITSQIQENENTNLRIKALLEELFNDPSVKNVRPYSPAQQEILRIYEDGVLNGQKEIPDDILKISKMARPSKSQLVKYKLWLEQKYRSPYTGEIIPLSQLFTSAYEIEHIIPQARYFDDSFSNKVICEAEVNREKGHQLAFEFITKRGGDEIELNFGKKVTILNVEEYQKFVKDHYGRSLRSLSKMRKLLMEDIPDDFIDRQLNDSRYISKVVRNLLSNIVRAEDENSLVSKHLITCTGGVTTRLKHEWGLNDVWNELITPRFVRLNKMGKEKFGEWINKKGKQVFQIQMPLELQKGFNKKRIDHRHHALDALVVACASRSHVNYLNNDSARANASETRYDLRNKLCYKDKTDSNGNYRWKFYKPWESFTEEAKNRLAGTVVSFKSNRRIMTRSSNRYFKWVDTSEGKKKKLVRQIKGDNQAIRKPLHKDTVLGKVSLRKEKKVSLSKAIDLWESIVDKPLKKRIQSLREQGYDKKLLLKYFKDRNNQFNGQDISRVNIYFFDNNLAARRVTLDASFNSEKRIDGITDSGIKKILYAHLQNEKYHGKKDEKGNEISPYELAFSPEGLEEMNANIKKLNGGKPHCPIYKVRLAETIGEKFKLGEKGNKNKKYVEAAKGTNLFFAVYVDEKGVRSFETIPFSVALERRKQKLAVVPEENENKEKLLFYLSPNDLVYVPDEDEKLIDYRQLSINPTRIYKMVSSSGTQCFFIPHFVASPIVQTMELGPNNKSERAWDGQMIKNVCYKLSVDRLGNVKIEK

SEQ ID NO: 292 - protein, 1515 aa, Anaerophaga thermohalophila
MKRILGLDLGTNSIGWALVESDEEQKSGKIQGIGSRIIPMDQNELDNFNKGNTVSQTAERTRLRMVRRLRERHLLRRERLHRVLKEIGFLPEHYLEQIDFTEKPGGFLPGKEPKIAYKPDNFKDKYDFLFQDSYHEMLSDFQDKNPEFIQKRKKVPQDWTIYYLRKKALTAKITKEELAWIILNFNQKRGYYQLRGEDEDVAKNTKKEEFHALKVVKVKEREDSEGASGKWYDIELENGWVYPRQSNIRPDWEGKILELIVTYNLDKDGNIKTDKEGNEKRSFRMPNKDDWTLRKKRTENEIEKSGKTVGEYIYDNLLDAPDLKIRGKLVSTIERKYYRSELEQILTAQKKYHPELSNSELFNKCISNLYPNNDIHRKALLSKDFVHLIINDIIFYQRPLKSKRSTVSNCPLEYRVYVDKVTGEKKKVPLKCIPKSHPLYQEFRLWQYVKNLRLFEKERFENGRLLTNVDVTEQFLPDEDKYVELFEFLNGRKTFKQDDILKFAGIKSAKDRVKYYWNYPQEKEYPGNETRYLIESRLKKIENVPDEWLNYEKIEELWHLLYSVTDKVEIEKGLQSFAAKYQLPDLFVEVFKGFPRMEREYGAFSKKAIKKLLPLMRMGKYWKLENINPDLIEKVQKIIDGEADDNINDGIRERFSEINEMSDLRGMPLWKASYLVYGRHSEAAEVIRWRTSADLDQYIKDFKQHALRNPIVEQVVLEALRVVKDVWNYFGEGREKFFDEIHVEIGRDLKNPADKRQKIANQIQENENTNLRIKALLVELFNDPEVQNVRPYSPVQQQLLKIYEDGVLNAERDIPDDIQKISRMANPTRNQLIRYKLWLEQKYRSPYTGEIIPLNKLFTSEYEVEHIIPRARYFDDSFSNKIISEAEVNRKKDRMLAFEFIKKLGGSTIDLNYGKKVSVLTVEEYQQFVKDHYGINPHSRLKMQKLLMDEIPESFIERQLNDSRYISKMVRNLLSNIVREENENSPVAKQLITCSGSITNTLKQEWGLNDVWNTIITPRFERLNKMGEQKYGEWVNKEGKPVFQIQMPLELQKGFNKKRIDHRHHALDALIVASATRSHVNYLSNEAAKTNAKDTRFDLRNRLCYKEKRGQNRNFTWRFYKPWNTFTEDAKNALNDIVVSFKSNHRVINKSTNRYFKWENLPGGMKKKRLVRQEKGDNWAIRQSLHKDTVLGKVSLRKVKPVSLSVALDSWNNIVDKALKKKIRSLKDQGYDKKLMLKYFKDRRNEYNGENISRVNVYYFDEEMAARRVDLDTSFNSEKRIEGITDSGIKKIIYAHLKNEKYHGQKDDKGKDISPYELAFSPEGIAEMNANIKQLNGGKPHCPIYKVRLAEPVGEKFQLGETGNKTEKLVEVAKGTNLFFGVYANDEGVRSFATVPFYLAVEREKQGLPAVPQENENGDQLLFWLSPNDLVYVPSEEDAHFANPKQIELDNSRIYKMVSSTGTQCFFIPHFVATPIVQTIELGPNNKSERAWDGQMIKKVCYKLSVDRLGNVEIE

SEQ ID NO: 293 - protein, 333 aa, Bacillus cereus
MMNPNNFTKEDFWRTIILYGLNQATYKIALGQSLIRFSEQQRNVVSMNELAEDFFDMYLERLKNGKPQLATPNRQTAMERIINSYNIGRLTRSQAIEKVEREAFNDVIDRFHTVDSLQVPMKFYEKTDKGIVIFDNVFEIFSDNNNFELRNELDARWDLLESAFEIKRTDSQLVNDIRKLYLANGYERTDITKNRSVLNGYQSNVCFYCGELMSDDDVHVDHVIPRQLINHDDIWNLVLSHGFCNQQKSDNLPDVNYIEKLIERNEYFIKSNHPISNKLKERLGNTPRRRRTTIDRIYEHAKLVLAPWKGIYGYNPATDPFYKTFIRNIVLSK

SEQ ID NO: 294 - protein, 1068 aa, Bacillus cereus
MRYVLGLDIGIASCGWAVINQEKERIEDLGVRIFDKAENPKDGKSLAAPRRDARSTRRTLRRKKHRMQRIKILLVKQGLLFKTELNHLYESATEFDVWNLRLDALERKLHPKEFARVLIHLAKRRGFKSNRKETTLSENGQILESISENQQIMEQQNYRTVGEMILKDKKFENHKRNKDGTYIGTVTRQQLQDEIQMIFHTQRLYKNDYATEEFESSYLEIWASQRPYASKDQIEKMIGYCTLEPKEKRTPKASWSFQYFVALQTINNLRLISKDKIEELSFEEKKQIMNLALEKPIVKYIDIRKLLSIPNDFQFNSLSYSADTVDTTLENKRCIELKEYHSINKVYKQVYGKNTPNLLPIDYDTIAYGLTIFKDDKDILEYLQNKYVNAKGKPIKNLAKKTYDDTFIQALLNLNFTKMGHLSFKALKNIIPFLEEGLSYDKACEKAGYNFKGTSYTERTKYLPVIPQNTNPVVHRALSQTRKVINAIIKKYGSPNAIHIETARELSKTFQERKEIDSRYQDNSKKNEHAIHKLKELGNINPSGINIVKFKLWSEQDGRCMYSGKYIEPHRLFEEGYTEVDHILPYSRSLDDSYNNKILTLGTENQRKGNKTPYEYMGNTSIWDEFETRVQSNKKINFKKQQKLLLQNFSYAREQEFIERNLNDTRYATIYLTSLIQQHLIFSESSSKKKVRTVSGIITSHLRSRWGFNKDRKEGHIHHALDAVIVAVTSNHMIQRVTKYYKLKELNKNLQAKQLPFPEPWEGFRLELEARISPNTQQYLKGIHFKNYADVNLSDIKPIFVSRMPKRSITGELHQETIRKFLGYNEKGKVLTAIKTKLEDIPFDANGDFPMYGKETDLYTYNAIKERYLSHEKDKRKSFQEPLYKPTKSGEIGPLIKSIKIMDTRTIVNPVNQGKGVVYNSKIARTDVFKKEDKYYLIPIYTIDLLKNILPHKAITAGKGYEDWTTIDSSFTFLFSLFPNDLIQIVPSKNKTIKARTTVSKKEILLPSLTGYFKGVHSGTAGITVETHDGSVIANVGSKQLLLFEKYQVDVLGHYTKIKEEKRMGMAI

SEQ ID NO: 295 - protein, 1078 aa, Bacillus cereus
MRYVLGLDIGIASCGWAVINQEKERIEDLGVRIFDKAENPKDGKSLAAPRRDARSTRRTLRRKKHRMQRIKVLLVKHGLLSKTELDHLYESATEVDVWNLRLDALERKLYPKEFARILIHLAKRRGFKSNRKETTLSENGQILESISENQQIMEKQNYRTVGEMILKDKKFENHKRNKNGTYVGTVTRQQLQDEIQMIFHAQRLYKNDYATEEFESSYLEIWASQRPYASKDQIEKMIGYCTLEPKEKRAPKASWSFQYFVALQTINNLRLISKDRIEELSFEEKKQIMNLALEKSIVKYIDIRKLLSVPNEFQFNSLSYSADTVDTAVESRKCIELKEYHSINKVYKQIYGENALNLLPKYYDTIAYGLTIFKDDKDILEYLQNKYVNAKGKPISNFANKTYDDTFIQALLNLNFTKMGHLSFKALKNIIPFLEEGLSYDKACEKAGYNFKGTSYTEQTKYLPVIPQNTNPVVHRALSQTRKVINAIIKKYGSPNAIHIETARELSKTFQERKEIDSMYQDNSKKNEHAIHKLKELGNINPSGINIVKFKLWNEQDGRCMYSGKYIEPHRLFEEGYTEVDHILPYSRSLDDSYNNKTLTLGTENQRKGNKIPYEYMGNTSIWNDFETRVQSNKKINKKKQQKLLLQHFSYAREQEFIERNLNDTRYATIYLSSLIQQHLIFSESSRKKKVHTVSGIITSHLRSRWGFNKDRKEGHIHHALDAVIVAVTSDHMIQRVTKYYKLKELNRNLQAKRMPFPEPWEGFRLELEARISPNTQQYLKGLRFKNYADVNLSEIKSIFVSRMPKHSITGELHQETIRKFIGYNEKGKVLTAIKTKLEDIPFDANGDFPMYGKESDLYTYNAIKERYLSHKKDKRKSFQEPLYKPTKSGGIGPLIKSIKIMDTRTIVNPVNQGKGVVYNSKIARTDVFKKEEKYYLIPIYTIDLMKNILPQKAITAGKGYEDWTTIDPSFTFLFSLFPNDLIQIVPSKNKTIKARTTVSKKEVLLPSLTGYFKGVHSGTAGITVETHDGSVIANVGSKQLLLIEKYQVDVLGNYTKIKEEKRIGLTTYNDNKKIAAC

SEQ ID NO: 296 - protein, 1088 aa, Bacillus smithii
MNYKMGLDIGIASVGWAVINLDLKRIEDLGVRIFDKAEHPQNGESLALPRRIARSARRRLRRRKHRLERIRRLLVSENVLTKEEMNLLFKQKKQIDVWQLRVDALERKLNNDELARVLLHLAKRRGFKSNRKSERNSKESSEFLKNIEENQSILAQYRSVGEMIVKDSKFAYHKRNKLDSYSNMIARDDLEREIKLIFEKQREFNNPVCTERLEEKYLNIWSSQRPFASKEDIEKKVGFCTFEPKEKRAPKATYTFQSFIVWEHINKLRLVSPDETRALTEIERNLLYKQAFSKNKMTYYDIRKLLNLSDDIHFKGLLYDPKSSLKQIENIRFLELDSYHKIRKCIENVYGKDGIRMFNETDIDTFGYALTIFKDDEDIVAYLQNEYITKNGKRVSNLANKVYDKSLIDELLNLSFSKFAHLSMKAIRNILPYMEQGEIYSKACELAGYNFTGPKKKEKALLLPVIPNIANPVVMRALTQSRKVVNAIIKKYGSPVSIHIELARDLSHSFDERKKIQKDQTENRKKNETAIKQLIEYELTKNPTGLDIVKFKLWSEQQGRCMYSLKPIELERLLEPGYVEVDHILPYSRSLDDSYANKVLVLTKENREKGNHTPVEYLGLGSERWKKFEKFVLANKQFSKKKKQNLLRLRYEETEEKEFKERNLNDTRYISKFFANFIKEHLKFADGDGGQKVYTINGKITAHLRSRWDFNKNREESDLHHAVDAVIVACATQGMIKKITEFYKAREQNKESAKKKEPIFPQPWPHFADELKARLSKFPQESIEAFALGNYDRKKLESLRPVFVSRMPKRSVTGAAHQETLRRCVGIDEQSGKIQTAVKTKLSDIKLDKDGHFPMYQKESDPRTYEAIRQRLLEHNNDPKKAFQEPLYKPKKNGEPGPVIRTVKIIDTKNKVVHLDGSKTVAYNSNIVRTDVFEKDGKYYCVPVYTMDIMKGTLPNKAIEANKPYSEWKEMTEEYTFQFSLFPNDLVRIVLPREKTIKTSTNEEIIIKDIFAYYKTIDSATGGLELISHDRNFSLRGVGSKTLKRFEKYQVDVLGNIHKVKGEKRVGLAAPTNQKKGKTVDSLQSVSD

SEQ ID NO: 297 - protein, 1069 aa, Bacillus thuringiensis
MNYDIGLRIGITSCGWSIINKDLERIEDLGVRVFEKAENPDGTASAAPRREARKSRRKHRRKKHRIERIKRLIVQHDLLSKKELDSLYLSPFNIDVWNLRVEALERKLDNREFARVLIHLVQRRGFQTIRKSVEIQEEGKLLENVSENERIMKVNGYKTVGEMFSKHEKFTHHKRNKDGSYTSVVTRSLLLKEIKTIFNSQRILGNVFSTQKLESDYLYIWGSQRPTLTYEQLMSMVGNCIYEKKEKRAPKTSWAFQYFSLLQKINKLKVSDDNTLRKLSKEERDIVIELAFKKKNVSFVDIRKALKLNDNTKFNHLTYSHVVETKKVEKATFIELKGYHLIKKQLKDRNVELTQELQPKDYDAIAAASTFFKNDIEFRDYLRNQYLDSNGKRKSNIANKVFEDKVIAAVFELNFSKVCHLSFKSLYKLIPHLEKGLDYKEAILCAGYNFRDENKRDKKLFLPVIQQETNPVVHRALTQARKVINAIIREYGSPNTIRFVVANDLAKTYKQRKELESTLKKNRAENEKIKTKLLSMGIINPTGMDIVKYKLWYEQSGICLYTGRQMELSSLFKPGYSIVNHIIPYNRSFDDTYHNRVLTLTETKYEKGNKIPFEYFGAEETCWNEYEKRVSTSKKIHDKKREKLLIRNFDIEYENEMISNNVFDTHYIGSYFEKYIDEHLQFKKSTKKQKVFSIHGNMVAHLHSRWGFNKNSREIYLNHAVDAAIVAVLTDQLIRNIADYYRRDNILEQKGSLKFPEPWKSFSIELEARISPQVRDLIKKLNLDSYLDVDILHIKPVFISKKPRRKVNGEAHKSTIRSLIGINEIGKTVTCIKTRLEDIPFDENGDFPMYGKDTDKYTYTAIKERYLEFNKDKEKAFSTPLYKLKRNGEPGNQIKSVKIIDTRNIVNKVNQGKGIAYNSNIIRVDVFSRDQKYYVVPIYLRDFIKGSLPNKIITAAKGFMQWPETDNSYTFLFSIFPNDLIKVVPKEGKFIKAKNENKENINLTEILGYFKGLDSSTGAFTLESHDGSLLARGIGTKNLLLIEKYQVDVLGRYNKVGNEERQDIKIQQN

SEQ ID NO: 298 - protein, 206 aa, Bacteroides cellulosilyticus
MKKILGLDLGCNSIGWALVNEAENTEEISSIIKLGVRVNPLTVDEMQNFEKGKSITTNADRTLKRSMRRNLQRYKLRRDTLIEVLKEHGFITDSTLLSEHGNKTTFETYRLRAKAAVEEISLEKFARVLLMINKKRGYKSSRKAKGSEDGVLIDGMDVARKLYEEGLTPGELCLQILEAGKKNLPDFYRSDLQNEFDRIWNFQKLV

SEQ ID NO: 299 - protein, 349 aa, Bacteroides coprosuis
MKKILGLDIGTNSVGWAVVNTNQEGEPSQIEKLGSRIIPMSQDILDKFGQGQTVSSTASRTDYRGIRRLRERSLLRRERLHRVLHILDFLPKHYADSIGWDPRNSKTYGKFLPGTEVKLAWVPTADGHQFLFYSTYLEMLEDLKQTQAQLFETSQTPVPLDWTIYYLRKKALTQPITKHELAWLLLHFNTKRGYYQRRGELEDTPTDKLVEYHALKVVDVEVDPEDQSKKPWYFVHLENGWIYKRQSSEPLDNWKGLVKEFIVTTHLDKEGKPKLDKEGEVRRSFSSPKEDDWTLVKKKTENDLEKSGLTVGAYIYQTLLNKPNQKIRGGLIKHIERNYYVEELEQILR

SEQ ID NO: 300 - protein, 1504 aa, Bacteroides coprosuis
MKKVLGLDIGTNSVGWAVVNQNDKGEFLSIEKIGSRIIPMSQDVMDKFGAGQTESSTAQRTQYRGVRRLRERSLLRRERLHRVLHILHFLPQHYDAAIGWNKKENKTYGKFLPGVEVNIPWVATDQGHQFIFMDSYAEMLKDLKQHQPHLFEKSSTPVPLDWTIYYLRKKALTQAISKEELAWILLNFNQKRGYYQLRGEEVEDNTKREEFYALKVVKVELDKDNTSAKTWYKVHLENGFIYPCPSDTPIDSWVGMVKDFIVTTTLEKDGSEKRTADGEIKRSFRAPKEDDWTLLKKKTESELEKSGKQVGAFIYDTLLSNPDQKIIGGLIKTIERKYYKKELEQILETQQKFIAELSDKKLFQACAEELYPLNDSHRENLLERDFKHLFVQDIIFYHRPLKTKKSLISNCTYEYRTFYKNGEKQISPIKCIAKSNPLFQEFRVWQFVQNLRILQRQRSEGDSIKYNVDVTAEFLKDENDIANLFTWLNERKVIKQDQLLKSYFKLKVNKETKELDYRWNYVDDKNKEYPCNATRTHILSFLEKCKEEKRIEDDRFVYSLWHLLYSVVEPIELRGALAKFAEREHLHPSFVDVFAQFPPLEKEYGSYSEKAIKRLLPLMRMGDYWHEDKIDVKTKQRIQRIIDGEADDDITHRSREKVENLRSITDFKGLPLWKAGYVVYNRHSESGELTKWKTPHELSNYIQNEFKQYSLRNPIVEQIVLETLRVVHDLWVKHGDFSEIHLELGRDIKNSSDKRKRMAERQQENENSRQRVLEMLIDLKKEAAFADLNPYSPSQQEKLRIVEDGVLRSNIEIPKDIEKITKSAKPTSRELTKYRLWLDQKYRSPYTGQPISLAQLFTSKYEIEHVIPQAKYFDDSFTNKVICESEVNKEKGSMLAHEFILKNGGSTVNVGGRQVQVLKNDAYVELINRLYGKNNPVKAKKLLAEDIDEVVGDFSERQLNDTRYISRVVQKLLSNIVREEDEQESTSKHVIGCSGQVTTALKKDWGLNDIWNKIIQPRFERLNEMTATEDYGVWQSPNHFQIRVPEEIQKGFTKKRIDHRHHAMDALVIACATRSHINYISNRSGQDRNAKFETTRTDLRSKLCYKENSSGNNYNYIFNKPWDTFTQDAHRALENIVVSHKQNLRVLTKTNNYTQFINKDGKKDLQKQVKGDHFAVRKPMHQETIYGRVSIRSIKEVALKKALENWKQIVDRTLKDKIRELIGAYGKYDAQTILKYFKDRDYKFNNLKINRVEVYEYDHNCAAVRKSIGDDLTIKQIERITDESIRKILMNHLSNYDDNLKEAFSPEGLMEMNKNIKELNGGKNHQPIYKVRLFEDLGSKFPLGVSHNNPDKYAIAAKGTNLFFGIYEDQEGKRMFDSIPLNIVIDRLKEKKSPVPETYNESKLKFHLSPNDLVYVPTDEEQKQPELVDVDHLSDEQKGRVYKAVSFTGNRAFFVNHRVSKVIHDYVEFGTKNKIENDDDKRSLKHICWKLKVNRLGEITDVKR

SEQ ID NO: 301 - protein, 1509 aa, Bacteroides eggerthii
MKTILGLDLGTNSVGWAVINSVIKEQAERIWIEMAGSRIIPMDAAVLGDFDKGNSISQTSERTRLRGARRLRERQLLRRERLHKVLNILGFLPNHYLEYIDFEKHPGKFLADAEPKLAWVKDEQGKYTFLFQAAFDEMLADFAIHQPSLVSGDKKIPYDWTIYYLRKKALTEMISKEELAWILLNFNQKRGYYQLRGEEEEDNAGKSVEFYALKVLTVEATDEKKGRDVWYNVHLENGWIYRRSSSVPLDWEGQVKEFIVTTDLNPDGTPKLDKYGEVKRSFRAPKEDDWMLIKKRTEADIANTHKTVGAYIYDTLLQKPQQKIIGKLVKTVERKLYRDELSLILQKQCAFHAELQDRALYARCVEALYPSNEVRRKNIANRDFVYLLMDDILFYQRPLKTKKSLIANCPYEENEYVDRETGEIKKTPLKCIAKSHPLFQEFRLWNFLSNIRIYQKEKEINGTLHLDVDVTAEFLKTEDDYVALFDWLNSRKEIEQKTFLKYPKFGLKKEISNYRWNYVEDKQYPCNETRHAILSSLEKANVCIDFLSNEKEVALWHILYSVSDKQEIEKALRTFAAKNGLDESFVEAFKKFPPFKSEYGAYSAKAIKKMLPLMRCGKYWDVSSIDDTTKERIKKIVTGEYDERISVKVRDKVMNLSDISCFRRLPLWLACYIVYNRHSEDKEAVKWESPADIDAYLASFKQHSLRNPIVEQVITETLRVVRDIWKQVGRIDEIHIELGREMKNPADKRKRMTAQILENENANLRIKALLAEFMNPEYEIENVRPYSPSQQEILRIYEDTVLHAEDQLPEEIDAILKKFNSSKVPTKSEFLRYKLWLEQKYRSPYTGELIPLGKLFTAAYEIEHVIPQSRYFDDSFSNKVICESAVNKLKDNQLGYEFIKNHHGQKVEVGFGKSVEIFSVDSYERFVKEQYAKSAVKMKKLLMDDIPEQFIERQLNDSRYISKVIKGLLSNIVREKNDSGEYEPEAVSKNIVVCTGSVTDRLKRDWGMNDVWNSIVYPRFERLNSLTDTQSFGHWENKSGKKVFQTELPLEYQKGFSKKRIDHRHHAMDAIVIACATRNHVNYLSNESASRNAKISRYDLQRLLCDKNRTDDNGNYKWVIKKPWDTFTQDAREVLSKIVVSLKQNLRIINKTTNVYRHLDATGNRVYEKQKTGDSWAIRKPMHKDTVFGAVNLRKVKVVRLSVALDTPAMIVDKRVKNKVFELLSYKYDKKRIEKYFKENAFLWKELDLAKVAVYYFTEATTEPLVAVRKPLDSTFNEKKIKESVTDTGIQKILLNHLCTKEGKPDLAFSAEGIEEMNRNLLQLNNGKSHQPIYKVRVYEPRGNKFSVGVLGNKGTKWVEAAKGTNLFFAIYITEDGKRTYETIPLNVVIEREKQGLVPVPDRNKKGDKLLFWLSPNDLVYLPTEEEREFGRINEPIDRGRIYKMVSCTGNEGHFIPANVANPIVPVIELGSNNKAQRAWTNEMIKDICIPIKVDRLGHIIEVKYRIDE

SEQ ID NO: 302 - protein, 1526 aa, Bacteroides faecis
MKKILGLDLGTNSIGWAVLNAADDNSLKYIEAAGSRIIPMDAAILGDFDRGNSISQTAERTRIRGMRHLRERYLLRRARLHRILNLLGFLPFHYAQDIDRYGNFSADMEPKIAWCKNLEGELEFIFIESFNEMLEDFRKNQPELVADNKKVPYDWVIYYLRKKALEKKISKEELAWILLNFNQKRGYYQLRGEDDDESMKTAKTRQYFDKQIIKNIIDTNQTYKGQRILIVELQNGDKGKIFKKEIPDWIGQEKNIIVTVDIDKDGNDKYEESGSLSCRFKIPTDAEWESEWKLIKMKTQKDLDESNKTVGTYIYDSILQNPTQKVRGKLVRTIERKYYKAELKQILEKQTEFHSELQDKDLYIECLNELYSNNDTHRNAITDRDFVYLFMNDILFYQRPLKSKKSLIDNCPYERNIYIDKETGEIKYSPIKCIAKSHPLFQEFRLWKFISSIRIYQRESVVEVVDKQLDLFSSQSTSVQKLVTDVDVTDKFLTCENDYVALFEWLNKKKIIDQKEFLKYRPFGLKGDIDNYRWNYVEDKSYPCNETHAMILTYFAKAGISEDILTKEMEEALWHILYSVEDRQEITKALRTFASKYHLSDSFVKVFSNIPPFKKEYGSYSAKAIKKLLSLMRMGKYWSEDAIDVNTRERIDKIVTGEYDEKIRDRVREKTIRLNDIRHFRALPDWLACYVVYDRHSETREITEWKSPEEIDEYIRNFKQHSLRNPIVEQVITETLRTVRDIWKQVGCIDEIHVELGREMKNPADKRKRITSQIIENENANLRVKALLTEFVNSEFEIENVRPYSLSQQDILRIYEDGVLNSVAEVPGDIAGILKKFNENDAKKRPTTSEILRYKLWLEQKYRSPYTGEMIPLSKLFTSAYEIEHVIPQSRYFDDSFSNKVICEAEVNKLKDNALGYEFIKKHHGEKVELGFGKIVEIFSVSVYEQFVKDNYSRNRGKMKKLLMDEIPEQFIERQLNDSRYISKVVKTLLSNVVREKAEQEAVSKNVIVCTGGVTDRLKKDWGINDVWNKIVLPRFLRLNELTNSTNFTAKNAAGNEIPAMPLELQKGFNKKRIDHRHHAMDAIVIACANRNIVNYLNNESASRKAKISRHDLQAILCDKVRTDDKGNYQWRVKKPWDTFTQDVYVALENIIVSFKQNLRVINKTSNYYWHYENGKKVLVKQVKGDSWAIRKPMHKDTVFGEVNLRKVKSVSLNEALKNPQFIVEKDLKRQLLSLLQQNFDIKKIKKYFEEHKDIWSDISLSKMNIYYFTKETKDRYFATRKPLDASFDKKKIESCITDTGIQQILLRHLELKENDPERAFSPDGIDEMNRNIIQLNKGKGHHPIAKVRVYEKADKFEVGQRGNKSSKFVEAAKGTNLFFAVYETEYPDEKTNSIVRKRNYATIPLNIAIERQKRGLSTAPEDEKGNVPSFVLSPNDLVYLPTSEDIVNGHITQPIDKSRIYKMVSSSGSQCFFIKHNIANIIVDKYEFSPLNKMERAISNEMIKEICIPVKVDRLGNIVKLGKSE

SEQ ID NO: 303 - protein, 1509 aa, Bacteroides fluxus
MKTILGLDLGTNSVGWAVINSVIKEQAERIWIEMAGSRIIPMDAAVLGDFDKGNSISQTSERTRLRGVRRLRERQLLRRERLHKVLNILGFLPNHYLEYIDFEKHPGKFLSDAEPKLPWVKDEQGKYTFLFQAAFDEMLADFAIHQPSLVSGDKKIPYDWTIYYLRKKALTEMISKEELAWILLNFNQKRGYYQLRGEEEEDNAGKSVEFYALKVLTVEATDEKKGRDVWYNVHLENGWIYRRSSSVPLDWEGQIKEFIVTTDLNPDSTPKLDKYGEVKRSFRAPKEDDWMLIKKRTEADIANTHKTVGAYIYDTLLQKPQQKIIGKLVKTVERKLYRDELSLILQKQCAFHAELQDRTLYARCVEALYPNNEVQRRNIANRDFVYLLMDDVLFYQRPLKTKKSLIANCPYEENEYVDRETGEIKKAPLKCIAKSHPLFQEFRLWNFLSNIRIYQKEKEINGTLHLDVDVTAEFLKTEDDYVALFDWLNSRKEIEQKTFLKYPKFGLKKEISNYRWNYVEDKQYPCNETRHAILSRLEKANVCIDFLSNEKEVALWHILYSVSDKQEIEKALRTFAAKNGLDESFVEAFKKFPPFKSEYGAYSAKAIKKLLPLMRCGKYWDVSSIDDTTKERIKKIVAGEYDERIAVKVRDKVMNLSDISCFKRLPLWLACYIVYNRHSEDKEAVKWESPADIDAYLASFKQHSLRNPIVEQVITETLRVVRDIWKQVGRIDEIHIELGREMKNPADKRKRMTAQILENENANLRIKALLAEFMNPEYEIENVRPYSPSQQEILRIYEDMVLHAEDQLPEEIDAILKKFNSSKVPTKSEFLRYKLWLEQKYRSPYTGELIPLGKLFTAAYEIEHVIPQSRYFDDSFSNKVICESAVNKLKDNQLGYEFIKNHHGQKVEVGFGKSVEIFSVDSYERFVKEQYAKSAVKMKKMLMDDIPEQFIERQLNDSRYISKVIKGLLSNIVREKNDSGEYEPEAVSKNIVVCTGSVTDRLKRDWGMNDVWNSIVYPRFERLNSLTDTQSFGHWENKSGKKVFQTELPLEYQKGFSKKRIDHRHHAMDAIVIACATRNHVNYLSNESASRNAKISRYDLQRLLCDKSRTDDNGNYKWVIKKPWDTFTQDAREVLSKIVVSLKQNLRIINKTTNVYRHLDATGNRVYEKQKTGDSWAIRKPMHKDTVFGAVNLRKVKVVRLSVALDAPTMIVDKRVKNKVFELLSYKYDKKRIEKYFKENAVLWKELDLARVAVYYFTEATTEPLVAVRKPLDSTFNEKKIKESVTDTGIQKILLNHLCTKEGKPDLAFSAEGIEEMNRNLLQLNNGKRHQPIYKVRVYEPRGNKFSVGVLGNKGTKWVEAAKGTNLFFAIYITEDGKRTYETIPLNMVIEREKQGLAPVPDKNEKGDKLLFWLSPNDLVYLPTEEELEFGRINEPIDRGRIYKMVSSSGNQCFFIPQSISNAIIPTKELGANNKAERSWDGAMIKNICIPVKVDRLGRIIEVKYRINE

SEQ ID NO: 304 - protein, 1436 aa, Bacteroides fragilis; identical to SEQ ID NO: 170

SEQ ID NO: 305 - protein, 1512 aa, Bacteroides nordii
MKNILGLDLGTNSIGWAVINSEEDGPIVKKRIELAGSRIIPMDAAVLGNFDSGVTKSQTAERTSFRSIRRLRERQLLRRERLHKVLQILGFLPEHYVNDIDFENHPGKIKRNTEPKLPWRKNSMGQFEFIFQDSFEAMLTDFATHQPVFVSEGKKVPYDWTLYYLRKKALTEGISKEELAWLILNFNQKRGYYQLRGEEEEEQSNKLVEFYALRVVKVEATDDKKGKDTWYNVHLENGWIYRRTSNIPLDWEGKVKEFIVTTDLNEDGTPKLDKYGEVKRSFRAPKEDDWTLIKKKTESDIANSHKTVGCYIYDALLQNPHQKIKGRLVRTVERKFYKEELRLILEKQLSFHPELQDRDLYRACIDALYVSNEAHKNNISGRDFVYLFIDDIIFYQRPLKTKKSLIDNCPYEENQYMDRETGEVKQAPIKCIAKSHPLFQEFRLWQFISNIRIYQRERVLDDGKLETDVDVTPDFLKTEDDYTTLFEWFNDRKEVDQKAFLKNPQFGLKKTFTEYRWNYVEDKSYPCNETRNAILNGLQKAGVSADFLSREVEEALWHILYSVEDKIEIESALRKFASKHDLDDRFADVFKKLPPFKKEYGAYSAKAIKKLLPLMRIGKYWELSNIDDKTKERIDKIITGEWDENIHDRVREKAIKLSDITDFKGLPLWLSCYVVYNRHSEARAIAKWESPEDIDSYLRLFRQHSLRNPIVEQVITETLRTVRDIWKRVGQIDEIHVELGREIKNPADKRAKMTAQIVENENTNLRIKALLAEFINSEYEIENVRPYSSNQQEKLKIYEDTVLNGVKEIPEDINTILKKFRESDLKKRPTKSDFLHYKLWLEQKYCSPYTGRIIPLGKLFTSAYEIEHIIPQAHYFDDSFSNKVICEAEVNGLKDKKLGYEFIKHNPGKMVEIGFGKPPVRIFSVEEYERFVKENYSGIKNKMNKLLMDDIPETFIERQLNDSRYISKVVKSLLSNIVREKDSNGEYEPEAISKNVIVCTGSVTDRLKRDWGVNDVWNSIIYPRFERLNELTGSQQFGCWENKEGKRVFQTAVPLEMQKGFSKKRIDHRHHAMDAIVIACATRNHINYLSNESASKKAKISRTDLQRLLCTKCRTDDNGNYKWIVKKPWPAFTQDIRKALENITVSFKQNLRVINKTTNYYVHFDESGKKVLEKQINGDSWAIRKPMHKDTVFGKVNLQKVKEVRLSLALDTPKMIVDKKLKEKVLQLYSYKYDKKRIDKYFKENASLWKDLNLSKVAVYYFTNDSTEPLVAVRKPLDTSFNAKKIKESVTDTGIQKILLNHLSNNQDDPNLAFSPDGIDKMNKNLTALNDGKYHQPIYKVRVCEPQGNKFSVGTSGNKTSKYVEAAKGTNLFFAVYQTEDGKRSYETIPLNVVIEREKLGWTPVPENNNNGDKLLFWLSPNDLVYVPTADELNNGMRLDNMDKGRIYKMISCSGPQCFFIPQNVSNAIIPVIELGANNKAEKSWNNEMIKVVCVPIRVDRLGCITQINNQK

SEQ ID NO: 306 - protein, 779 aa, Bacteroides oleiciplenus
MKEGNQYDVACEYAGYRHSKSSLTREEIDNKVLKNRLEILPKNSLRNPVVEKILNQMVNVVNAVIDTYGKPDEIRVELARELKKGAKEREELAKSIAQNTREHEAIRQLLQTEFGMMHVTRNDIIRYKLYEELKDNGYKTLYSDQYIPREKVFSKEIDIEHIIPQARLFDDSLSNKTLEYRAVNIEKGNKTAYDFVKEKYGNDGLRRYLNHCEALFKDKKTKLKKLKMEDQDIPDGFIDRDLRNTQYIAKKALSMLSEISRRVVATTGSITDELRKDWQLVDIMKELNLPKYEALGFVETFKDKDGRIIKKIKDWSKRNDHRHHAMDALTVAFTKDVFIQYFNNKNAFWMSGSKEHANITAIKNKYFEKGKALAPIPLELFRTEAKHHLENILVSIKAKNKVVTNNINRTKKKNGENLKLQQTPRGQLHLESIYGSYRQCIIRDEKVNASFDASKIANVSKSAYRNALLKRLEAYDNDPKKAFTGKNSLDKNPVYLDENKMEKVPDRVKIVEFETVYTIRKPIDPKLSIDKVVDARIRTLLKKRLEEYGGDAQRAFSNIEENPIWLNKEKGISVKRVAIRGISNAQALHDKKDKDGNPILDKEGKGIPTDFVNTSNNHHVAIYRKPVVDKMGQVILDENGSPRYELGEDVISFFEAVARVNLRQPVVDKDYKRSEGWQFLFSMKQNEYFVFPNEKTGFNPKEIDLLNPENYALISPNLFRVQKIGLNDYTFRHHLETSIQNNSNELKFITWIRCGKNGINGVIKVRVNHIGQIVSMGEY

SEQ ID NO: 307 - protein, 653 aa, Bacteroides oleiciplenus
MKKILGLDLGSSSIGWALVNEGANDEEKSSIIKLGVRVNPLTVDEAQNFEKGKSITTNADRTLKRGMRRNLQRYKQRREALVEVLKKHEFITAGTLMSEQGNKTTFETYRLRAKAVEEEISLEEFARVLLMINKKRGYKSSRKAKGDEDGVLIDGMDVAKKLYDEDLNPGELCLQLLEAGKKTLPDFYRSDLQDEFDKIWNFQKQFNPESFCDTAKEEVRGKNRTQTWTILSKYFVWTEGDSVWNNEEARTEERIKEYKLVGIKRTTKGYEQKLENYRWRVQALSEQLNPEIIAIVLQEINGQISASSGYLGAISDRSKELFFNHQTVGQSLMSELDKNPNGSLRNKVFYRQDYLDEFNTIWEKQSLYHKELTVELKKEIRDIIIFYQRRLKSQKGLISTCEFEQREIIVEKDGKRKTKIIGCKVIPRSHPLFQEFKIWQTLNDVEVYVADRRTKRKQDRKSTTLFSDTEDILLVEGKRYLYQEEKELLAKELFVRENMKKAEVLKLLFEDPKELDLNFKQIDGNRTGFALFSAYSKMIEKYGYESVNFKNSADEIIEKLQIIFADLGWNTELFSIDLSKDDKELEKQPYFRLWHLLYSFEGDNTPTGNGKLIEALMRLCSVEKEYASVLANVSFQEDYGSLSAKAIKKYYLI

SEQ ID NO: 308 - protein, 1436 aa, Bacteroides sp.
MKRILGLDLGTNSIGWALVDEAENKDERSSIVKLGVRVNPLTVDELTNFEKGKSITTNADRTLKRGMRRNLQRYKLRRETLMEVLKEHKLITEDTILSENGNRTTFETYRLRAKAATEKISLEEFARVLLMINKKRGYKSCRKAKGAEEGTLIDGMDIARELYNNNLTPGELCLQLLDAGKKYLPDFYRSDLQNELDRIWEKQKEYYPEILTEVLKEELRGKKRDAVWAICAKSFVWEEYYTEWNKEKGKTEQQEREHKLEGIYSKRKRDEAKRENLQWRVNGLKEKLSLEQLVIVLQEMNIQINNSSGYLGAISDRSKELYFNKQTVGQYQMEMLDKNPNASLRNMVFYRQDYLDEFNTLWEKQAEYHKELTGELKKEIRDIVIFYQRRLKSQKGLVGFCEFESRQIEVEIDGKKKIKTVGNRVIPRSSPLFQEFKIWQILNNIEVTVVGKKGKRRKQKDNSPTLFDGLDDTEQLELNGSRYLYQEEKELLAQELFVRDKMTKSDVLKLLFDNPQELDLNFKTIDGNKTGYTLFQAYSKMIEMSGHEPVDFKKTVEKVVEHVKAVFDLLNWNTDILGFNSNEELDNQSYYKLWHLLYSFEGDNTPTGNARLVQKITELYGFEKEYAIILANVTFQDDYGSLSAKAIHKILPHLKEGNRYDVACAYAGYKHSESSLTKEEIANKALKDRLTLLPKNNLRNPVVEKILNQMVNVINAIIDTYGKPDEIRVELARELKKNAKEREELTKFIAETTRKHEEFKILLQSEFGLTNVSRTDILRYKLYKELESCGYKTLYSNTYIPREKLFSKEFDIEHIIPQARLFDDSFSNKTLEARSINLEKGNKTAYDFVKEKFGESGADNSLDHYLNNIEDLFKSGKISKTKYNKLKMAEQDIPDGFINRDLRNTQYIAKKALSMLNEISRRVVATSGTITDKLRQDWQLVDVMKELNWEKYKALGLVEYFEDKDGRQIGRIKDWTKRNDHRHHAMDALTVAFTKDIFIQYFNNKNASLNSNTNEYAIKNKYFQNGRAIAPIPLREFRVEAKKHLENTLISIKAKNKVVTGNINKTKKRGGVNKYLQQTPRGQLHLETIYGSGKQYLTKEEKVNASFDMKKIATVSKSAYRDVLLKRLHENDNDPKKAFTGKNSLDKQPIWLDKEQTRKVPEKVKTVTLETIYTVRKEISPDLKVDKVIDAGVRKILTGRLNEYGNDAKKAFSNLDENPIWLNKEKGISIKRVTISGISNAQSLHVKKDKDGKPILDEDSRNIPVDFVNTGNNHHVAVYRRPVIDKRGQLVIDEAGNPKYELEEVVVSFFEAVTRANLGQPIIDKDYKTSEGWQFLFSMKQNEYFVFPNEKTGFNPKEIDLLDAENYGVISPNLFRVQKFAHKNYVFRHHLETTIKDTSSILKGITWIDFRSSKGLDAIVKVRVNHIGQIVSVGEY

SEQ ID NO: 309 - protein, 1510 aa, Bacteroides sp.
MKRILGLDLGTNSIGWALVDSEEQRILGMGSRIIPMDQGVLDTFSGGNPVETQTAARTAYRGTRRLRERALLRRERLIRVLNMMKFLPEHYASQIDFEKRLGQFFDEKEPKLAWKQNDEGRFEFIFQQSFNEMIEEFKNKGVVREDKKIPYDWTIYYLRKKALSQEIEKEELAWILLNFNQKRGYYQLRGEEEEENPNKLVEYYSLKIVDVIADEKPNSKGDIWYSLHLENGWIYRRSSKIPLFGWKDKTRDFIVTTDLNDDGTVKKDKEGIEKRSFRAPSENDWVLLKKKTESDIEKSHKTVGAYVYETLLQNPMQKVRGKLVRTIERKFYKDELKQILEKQREFHPELRDEDLYNDCVRELYRSNETYQFILSKRDFVHLFLDDILFYQRPLRSQKSAIGDCILEFKTYKDKDGNNIKEYLKVISKSNPLYQEFRIWQWLYNLKIYRKEDDEDVTLQFIANIEDKEQLFDFLSNRKSIEQKPLLEYLIKAKGLKKQVKTEAYRWNYVEDKIYPCSETKTMISTRLAKVENIPDNFFTKEIEQKLWHIIYSVTDKNEFEKALRTFAKKYDLDIASFVDNFKKIPPFKNEYGSFSEKAIKKLLPLMRLGKYWKWNDIDNNTQNRISKIITGEYDEEIKDIVREKSIALTNENDFQGLQLWLAQYLVYGRHSEADIAGKWHSVADLEKYLNEFKQHSLRNPIVEQIITETLRVVRDIWRKYGQGAENFFSEIHVELGRDMKNTADERKKIVNVVTENENTNLRIKALLMELKNNSDGKLEVENVRPYSPTQQDILKIYEEYAISTGLDNEKDEKVKEDIKKISRVAQPTTTELQRYKLWLEQKYCSPYTGKVIPLGKLFTEEYQIEHIIPKSRYYDDSFSNKVICEAAVNKLKDKCLGLEFIKNYHGQIVETGFGQKVTIFDEEAYQNFVKQHYAYNRSKRTKLLLEEIPEKMIERQMNDTRYISKFVLPLLSNLVRAEENDNGVNSKNVLPVNGKITTMLKQDWGLNDVWNDLILPRFVRMNELAKTIAFTSWNEQHQKYLPTVPLELSKGFQKKRIDHRHHAMDALVIACATRDHVNLLNNKHANTDTIRYDLQRKLRLFERVTYIDPQTKNNVTKDIPKEFKKPWDNFTVDARNELEKIIVSFKQNLRIINKATNIYTKYENGKKIKVGQKGLNWAIRKPLHKETVFAKVSLRKRKTVRLSEALKDWKKIVDKKLKQEIKRLTCQYGKFDVDTILRYFKDRKYQFGEVDVSKVKMYYFDEENAAVRKNVDTSFTEKFIQGSVTDTGIQKILLNHLEAKGNKVEIAFSPEGIEEMNKNIIQLNEGKLHLPIFKVRVYETIGNKFSVGVKGNKKDKYVEAAKGTNLFFAIYVDENGIRSYETIPLNIVIERLKQGLSVVPEKNRKEHSLLFYLSPNDLVYVPIEDERENIHAVNLDQLNNEQRKRIYKMVSCTGSECHFVPYYVASPIVNKVEYSSLNKIGRSLTGEMIKDVCIKLKVDRLGNVKGISGL

SEQ ID NO: 310 - protein, 1436 aa, Bacteroides sp.
MKRILGLDLGTNSIGWALVNEAENKDERSSIVKLGVRVNPLTVDELTNFEKGKSITTNADRTLKRGMRRNLQRYKLRRETLTEVLKEHKLITEDTILSENGNRTTFETYRLRAKAVTEEISLEEFARVLLMINKKRGYKSSRKAKGVEEGTLIDGMDIARELYNNNLTPGELCLQLLDAGKKFLPDFYRSDLQNELDRIWEKQKEYYPEILTDVLKEELRGKKRDAVWAICAKYFVWKETYTEWNKEKGKTEQQEREHKLEGIYSKRKRDEAKRENLQWRVNGLKEKLSLEQLVIVFQEMNTQINNSSGYLGAISDRSKELYFNKQTVGQYQMEMLDKNPNASLRNMVFYRQDYLDEFNMLWEKQAVYHKELTEELKKEIRDIIIFYQRRLKSQKGLIGFCEFESRQIEVDIDGKKKIKTVGNRVISRSSPLFQEFKIWQILNNIEVTVVGKKRKRRKLKENYSAIFEELNDAEQLELNGSRRLCQEEKELLAQELFVRDKMTKSEVLKLLFDNPQELDLNFKTIDGNKTGYALFQAYSKMIEMSGHEPVDFKKPVEKVVEYIKAVFDLLNWNTDILGFNSNEELDNQSYYKLWHLLYSFEGDNTPTGNGRLIQKMTELYGFEKEYATILANVSFQDDYGSLSAKAIHKILPHLKEGNRYDVACVYAGYRHSESSLTREEIANKVLKDRLMLLPKNSLHNPVVEKILNQMVNVINVIIDIYGKPDEIRVELARELKKNAKEREELTKSIAQTTKANEEYKTLLQTEFGLTNVSRTDILRYKLYKELESCGYKTLYSNTYISREKLFSKEFDIEHIIPQARLFDDSFSNKTLEARSVNIEKGNKTAYDFVKEKFGESGADNSLEHYLNNIEDLFKSGKISKTKYNKLKMAEQDIPDGFIERDLRNTQYIAKKALSMLNEISHRVVATSGSVTDKLREDWQLIDVMKELNWEKYKALGLVEYFEDRDGRQIGRIKDWTKRNDHRHHAMDALTVAFTKDVFIQYFNNKNASLDPNANEHAIKNKYFQNGRAIAPMPLREFRAEAKKHLENTLISIKAKNKVITGNINKTRKKGGVNKNMQQTPRGQLHLETIYGSGKQYLTKEEKVNASFDMRKIETVSKSAYRDALLKRLYENDNDPKKAFAGKNSLDKQPIWLDKEQMRKVPEKVKIVTLEAIYTIRKEISPDLKVDKVIDVGVRKILIDRLNEYGNDAKKAFSNLDKNPIWLNKEKGISIKRVTISGISNAQSLHVKKDKDGKPILDENGRNIPVDFVNTGNNHHVAVYYRPVIDKRGQLVVDEAGNPKYELEEVVVSFFEAVTRANLGLPIIDKDYKTTEGWQFLFSMKQNEYFVFPNEKIGFNPKEIDLLDVENYGLISPNLFRVQKFSLKNYVFRHHLETTIKDTSSILRGITWIDFRSSKGLDTIVKVRVNHIGQIVSVGEY

SEQ ID NO: 311 - protein, 1424 aa, Bacteroides sp.
MKRILGLDLGTNSIGWALVNEAETDEEVSSIIRLGVRVNPLTVDETQNFEKGKSITTNAERTLKRSMRRNLQRYKLRRDALVEFLKELGFITDETILSEQGNRTTFETCRLRAKAAEEEISLEELSRVLLMINKKRGYKSSRKVKKEEDGVLIDGMEIAKKLYEEDLTPGQLCSQLLESGKKVLPDFYHSDLQEELDRIWSVQKQFHPDVFCDAAKEEIKGKNRSQTWAILANYFVWKEEVVGWNDREAKNETIEKECKLVGLKRTTKGYELKKENYRWRAQALTEQLGLEEIAVVLQEINGQINASSGYLGAISDRSKVLYFNHQTVGQYQMAELDKNPHASLRNMVFYRQDYLDEFDRIWEKQAEFHKELTAELKKEIRDMIIFYQRRLKSQKGLISFCEFERLEIVVEKDGKKQTKVIGCKVIPRSHPLFQEFKVWQTLNDIKVLGREKKRNALSASESRALYPEEKEILARELAIKENMKKADVLKLLFENPQELDLNFKQIDGNRTGFSLFSAYSKMIEKYGYEPLDFKKPADEIIGQLRTIFTDLGWNTNLFTIDLTKEGKELEMQPYFRLWHLLYSFEGDNTSTGNGKLIEKIMQLCGVEKEYAVELASLSFQDDYGSLSAKAIKRILPYLKEGNLYDVACEYAGYRHSKSSLTKEEIENKVLKGKLEVLPKNSLRNPVVEKILSQMVNVINTIIDTYGKPDEIRVELARELKKSAKEREELTKAIAKSTREHEEIRKLLQDEFGMMNVSRNDIIRYKLYEELKDNGYKTLYSNQYIPKEKIFSKEIDIEHIIPQSRLFDDSLSNKTLEYKAINIEKGNKTAYDFVKEKYGEEGLQQYINRCESLFNDKKAKLRKLKMEQKDIPDGFIDRDLRNTQYIAKKALAMLNEICRRVVATTGSITDQLREDWQLVDVMKELNLPKYEALGFVETYEDKDGRKIKRIKDWTKRNDHRHHAMDALTVAFTKDAFIQYFNNKNAAQDSGNRNHTNIIGIKTRYFDKGRALPPIPLEQFRIEAKQHLEKLLVSIKAKNKVVTVNVNRTKKRKGENTKIQQTPRGQLHLETVYGSHKQYVTKIEKVNASFDAAKIATVSKRAYRNALLKRLETFGNDPKKAFTGKNALEKNPLYADKYQTIRVPEKVQTVEFETIYTIRKPVDPALNVDKVVDVKVRAILERRLKEYGGDPKKAFVNFWENPIWLNKEKGISIKRVSIRGINNAQSIHVKKDKNGNPIWDENGKQIPVDFVNTGNNHHVAIYRKPVLDKKGQVTFDEDGNLMYELDEVVVPFFEAVTRANLGLPIIDKDYRKSEGWQFLFSMKQNEYFVFPNEKTGFNPKEVDLLNPDNYAMISPNLFRVQTMSKVMYGNNVVRDYKFRHHLETTVKDMKELKDIAYKQYKTLSFGNSVVKIRINHIGQIVSVGEY

SEQ ID NO: 312 - protein, 1055 aa, Bacteroides sp.
MRIYRKDLAQDVDVTNELLKTEEDYVALFDWLNGKKEIDQKAFLKYPLFGLKKEVENYRWNYVQDKPYPCNETRSSMLARLEKCDISIEFLTKENEEALWHILYSVEDKNEIVKALQKFADKHDLNASFVDVFQKFPPFKKEYGSYSAKAIKKLLPLMRMGKYWSENSIDKGTRERMDKIITGEYDEKIENRVREKAIHLADVSDFKGLPLWLVCYIVYGRHSEAKEITQWKSPADIDLYLRSFKQHSLRNPIVEQIIIETLRVVRDIWKQVGNIDEIHVELGREMKNPADKRKKMTQQMSENENTNLRIKYLLTEFLNPEYEVENVRPYSPSQQDILRIYEEGVLNSVSDLPEEISDILKKFTETDLKKRPSRSEVLRYKLWLEQKYRSPYTGEVIPLGKLFTPAYEIEHVIPQSCYFDDSFSNKVICEAEVNKLKSNLLGHEFIVKHHGEIVELPFGKKVRIFTVDEYEQFVKDNYSRTRSKMKKLLMDDIPEEFVARQLNDSRYISKVVKSLLSNIVREKGEEEAISKNVIPCTGGVTDRLKKDWGINEVWNKIILPRFQRLNELTGTNKFTTKNVGIQEIPTMPLELQKGFNKKRIDHRHHAMDAIIIACANRNIINYLNNESATAKAELSRYDLQKMLCDKAKTDNNGNYKWVIRKPWASFTQDTYLALENIIVSFKQNLRVINKATNHFLHYNEEGKKIFVKQGKGDNWAIRKSMHKDTVFGEVNLRRIKTVALNEAMKNPQSIVVKDFKRKLLELWNLGFDAKRIKKYFEDNRETWSDINLSKIEVYYFSKDTKDRFFATRKPLDTSFDRKKIENNITDTGIQKILLRHLELKDNNPDIAFSPDGIDEMNRNIIQLNNGKYHQPIIKVRWYEQADKFAVGQTGNKSSKFVEAAKGTNLFFAVYESNILDKKTNTIIKKRNYATIPLNVAIERQKQGLPVAPEDENGNDPIFVLSPNDLVYLPTAADLANGIIAQPLDRGRIYKMVSCTGNEGYFIPARIANPILQTIELGSNNKAQKAWTDEMIKEICMPIKVDRLGNVLESSSSYKK

SEQ ID NO: 313 - protein, 1055 aa, Bacteroides sp.
MRIYRKDLAQDVDVTNELLKTEEDYVALFDWLNGKKEIDQKAFLKYPVFGLKKEIENYRWNYVQDKPYPCNETRSLMLARLEKCDISIEFLTKENEEALWHILYSVEDKNEIVKALQKFADKHDLNASFVDVFQKFPPFKKEYGSYSAKAIKKLLPLMRMGKYWSENSIDKGTRERIDKIITGEYDEKIENRVREKAIHLADVSDFKGLPLWLVCYIVYGRHSEAKEIIQWKSPADIDSYLRSFKQHSLRNPIVEQIIIETLRVVRDIWKQVGNIDEIHVELGREMKNPADKRKKMTQQMSENENTNLRIKYLLTEFLNPEYEVENVRPYSPSQQDILRIYEEGVLNSVSDLPEEISDILKKFTETDLKKRPSRSEVLRYKLWLEQKYRSPYTGEVIPLGKLFTPAYEIEHVIPQSCYFDDSFSNKVICEAEVNKLKSNLLGHEFIVKHHGEIVELPFGKKVRIFTVDEYEQFVKDNYSRTRSKMKKLLMDDIPEEFVTRQLNDSRYISKVVKSLLSNIVREKGEEEAISKNVIPCTGGVTDRLKKDWGINEVWNKIILPRFQRLNELTGTNKFTTKNVGIQEIPTMPLELQKGFNKKRIDHRHHAMDAIIIACANRNIINYLNNESATAKAELSRYDLQKMLCDKAKTDNNGNYKWVIRKPWASFTQDTYLALENIIVSFKQNLRVINKATNRFLHYNEEGKKIFVKQGKGDNWAIRKSMHKDTVFGEVNLRRIKTVALNEAMKNPQSIVVKDFKRKLLELWNLGFDAKRIKKYFEDNRETWSDINLSKIEVYYFSKDTKDRFFATRKPLDTSFDRKKIENNITDTGIQKILLRHLELKDNNPDIAFSPDGIDEMNRNIIQLNNGKYHQPIIKIRWYEQADKFAVGQTGNKSSKFVEAAKGTNLFFAVYESNILDKKTNTIIKKRNYATIPLNVAIERQKQGLPVAPEDENGNDPIFVLSPNDLVYLPTDDELANGIIAQPLDRGRIYKMVSSSGEQCFFIKHIVANVLVDKFEFSPLNKMERALTGEMIKMICIPIKVDRLGNVLESSSSYKK

SEQ ID NO: 314 - protein, 286 aa, Bacteroides uniformis
MLSYKYDKKKIEKYFKENAFLWKELDIAKVAVYYFTENTTEPLVAVRKSLDSTFNEKKIASVTDTGIQKILLNHLKSKEGKAELAFSAEGIEEMNRNLLQLNDGKGHQPIYKVRVYEPRGNKFKVGVLGNKGAKWVEAAKGTNLFFAIYITEDGNRTYETIPLNWVIEREKQGLVPVPDRNEKGDKLLFWLSPNDLVYLPTEEERDFGRINEPIDRGRIYKMVSSSGNQCFFIPQSISNAIISTKELGSNNKAEKSWDGEMIKNICIPVKVDRLGRIIEVKYRVNE

SEQ ID NO: 315 - protein, 1508 aa, Bacteroides uniformis
MRTILGLDLGTNSIGWAVINSVIKEQTERIWIEMAGSRIIPMDAAILGDFDKGNSISQTAERTRFRGVRRLRERQLLRRERLHKVLKILGFLPEHYLKGIDFEKHTGKFLSGSEPKLPWVKDRWGKYSFLFQTAFNEMLADFAKHQPSLVFDGKKIPYDWTVYYLRKKALTEMISKEELAWILLNFNQKRGYYQLRGEEEEDNAGKSVEFYALKVLSVEATDEKKGRDIWYNVHLENGWVYRRSSNVPLDWEGRVKEFIVTTDLNPDGTPKLDKYGEVKRSFRAPKEDDWMLIKKRTEADITGTHKTIGSYIYDALLQEPQQKIIGKLVKTVERKFYKEELNFILQKQCAFHAELQDRDLYMRCIEALYPGNEVQRRNIANRDFIYLLIDDVLFYQRPLKTKKSLIANCPYEENEYVNRKTGEIKTAPLKCIAKSHPLFQEFRLWYFLSNIRVYQKEREVNGTLHLDVDVTTEFLKTEDDYVALFDWLNSRKEIDQKAFLRYPAFGLKKEINNYRWNYVEDKFYPCNETRHAILSRLEKAGIGIDFLSDEKETALWHILYSVSDKQEIEKALATFAVKNGLNESFVEVFKKFPPFKSEYGAYSAKAIKKLLPLMRCGKYWDMSLIDGTTKERIERIIAGECDESIGAKVREKAMNLSDISCFKRLPLWLACYVVYNRHSEDKEITKWETPADIDAYLAAFKQHSLRNPIVEQVITETLRVVRDIWKQVGKIDEIRIELGREMKNPADKRKRMTTQILENENANLRIKALLAEFVNPEYGVENVRPYSPSQQEILRIYEDAVLKGEEQIPEDIDVILKKFNTSKLPTKSEFLRYKLWLEQKYRSPYTGELIPLAKLFTAAYEIEHVIPQSRYFDDSFSNKVICESAVNKLKDNQLGYEFIKNHHGQKVEVGFGKTVEIFSVDSYERFVKEQYAKSGIKMKKLLMDDIPEQFIERQLNDSRYISKVVKGLLSNIVREKNDSGEYEPEAVSKNILVCTGSVTDRLKKDWGMNDVWNSIVSPRFERLNALTETQCFGHWENKDGKKVFQTAVPLEYQKGFSKKRIDHRHHAMDAIVIACATRNHVNYLNNESASRNAKISRYDLQRLLCDKSRGDGNGNYRWIIKKPWTTFTQDAREALSGIIVSLKQNLRIINKTTNIYQHFDANGTRVYEKQKIGDSWAIRKPMHKDTVFGAVNLRKVKVVRLSVALDTPSMIVNKRVKNKVLELLSYKYDKKKIEKYFKENAFLWKELDIAKVAVYYFTENTTEPLVAVRKSLDSTFNEKKIASVTDTGIQKILLNHLKSKEGKAELAFSAEGIEEMNRNLLQLNDGKGHQPIYKVRVYEPRGNKFKVGVLGNKGAKWVEAAKGTNLFFAIYITEDGNRTYETIPLNWVIEREKQGLVPVPDRNEKGDKLLFWLSPNDLVYLPTEEERDFGRINEPIDRGRIYKMVSSSGNQCFFIPQSISNAIISTKELGSNNKAEKSWDGEMIKNICIPVKVDRLGRIIEVKYRVNE

SEQ ID NO: 316 - protein, 1210 aa, Bacteroides uniformis
MRTILGLDLGTNSIGWAVINSVIKEQTERIWIEMAGSRIIPMDAAILGDFDKGNSISQTAERTRFRGVRRLRERQLLRRERLHKVLKILGFLPEHYLKGIDFEKHTGKFLSGSEPKLPWVKDRWGKYSFLFQTAFNEMLADFAKHQPSLVFDGKKIPYDWTVYYLRKKALTEMISKEELAWILLNFNQKRGYYQLRGEEEEDNAGKSVEFYALKVLSVEATDEKKGRDIWYNVHLENGWVYRRSSNVPLDWEGRVKEFIVTTDLNPDGTPKLDKYGEVKRSFRAPKEDDWMLIKKRTEADITGTHKTIGSYIYDALLQEPQQKIIGKLVKTVERKFYKEELNFILQKQCAFHAELQDRDLYMRCIEALYPGNEVQRRNIANRDFIYLLIDDVLFYQRPLKTKKSLIANCPYEENEYVNRKTGEIKTAPLKCIAKSHPLFQEFRLWYFLSNIRVYQKEREVNGTLHLDVDVTTEFLKTEDDYVALFDWLNSRKEIDQKAFLRYPAFGLKKEINNYRWNYVEDKFYPCNETRHAILSRLEKAGIGIDFLSDEKETALWHILYSVSDKQEIEKALATFAVKNGLNESFVEVFKKFPPFKSEYGAYSAKAIKKLLPLMRCGKYWDMSLIDGTTKERIERIIAGECDESIGAKVREKAMNLSDISCFKRLPLWLACYVVYNRHSEDKEITKWETPADIDAYLAAFKQHSLRNPIVEQVITETLRVVRDIWKQVGKIDEIRIELGREMKNPADKRKRMTTQILENENANLRIKALLAEFVNPEYGVENVRPYSPSQQEILRIYEDAVLKGEEQIPEDIDVILKKFNTSKLPTKSEFLRYKLWLEQKYRSPYTGELIPLAKLFTAAYEIEHVIPQSRYFDDSFSNKVICESAVNKLKDNQLGYEFIKNHHGQKVEVGFGKTVEIFSVDSYERFVKEQYAKSGIKMKKLLMDDIPEQFIERQLNDSRYISKVVKGLLSNIVREKNDSGEYEPEAVSKNILVCTGSVTDRLKKDWGMNDVWNSIVSPRFERLNALTETQCFGHWENKDGKKVFQTAVPLEYQKGFSKKRIDHRHHAMDAIVIACATRNHVNYLNNESASRNAKISRYDLQRLLCDKSRGDGNGNYRWIIKKPWTTFTQDAREALSGIIVSLKQNLRIINKTTNIYQHFDANGTRVYEKQKIGDSWAIRKPMHKDTVFGAVNLRKALIPQHYNLTLFISS

SEQ ID NO: 317 - protein, 1504 aa, Bacteroides vulgatus
MKNIVGLDLGTNSIGWAVVNGSVNDDGSEQLVKIQASGSRIIPMDAAMIGDFNKGNSISQTAERTRLRGVRRLSERYLLRRERLHRILDILGFLPFHFAQDLDRHGKIVKGKEPKLAWRKNEAGQFEFIFQDSFKEMLEDFKLNHPNLITDDKKVPYDWTIYYLRKKGLTSKISKEELAWILLNFNQKRGYYQLRGEEEEENKNKLVEFYALKVVAVEDSGEKKGKDIWYNVHLENGWVYRRTSNMPLDWVGKTKEFIVTTDLEKDGTPKKDKEGNVKRSFRAPKEDDWSLLKKKTEADIDQTHKTVGVYIYDTLLGNPSQKIRGRLVRTIERKYYKEELKQILEKQKEFHLELQDRALYAACIEELYPINEAHRNNVGNRDFTYLFLEDILFYQRPLKSKKSLIDNCPYEENQGLDKETGEIKSFPVKCIAKSHPLFQEFRLWQFIVNLRIYRKDLAQDVDVTNELLKTEEDYVALFDWLNGKKEIDQKAFLKYPVFGLKKEIENYRWNYVQDKPYPCNETRSLMLARLEKCDISIEFLTKENEEALWHILYSVEDKNEIVKALQKFADKHDLNASFVDVFQKFPPFKKEYGSYSAKAIKKLLPLMRMGKYWSENSIDKGTRERIDKIITGEYDEKIENRVREKAIHLADVSDFKGLPLWLVCYIVYGRHSEAKEITQWKSPADIDSYLRSFKQHSLRNPIVEQIIIETLRVVRDIWKQVGNIDEIHVELGREMKNPADKRKKMTQQMSENENTNLRIKYLLTEFLNPEYEVENVRPYSPSQQDILRIYEEGVLNSVSDLPEEISDILKKFTETDLKKRPSRSEILRYKLWLEQKYRSPYTGEVIPLGKLFTPAYEIEHVIPQSCYFDDSFSNKVICEAEVNKLKSNLLGHEFIVKHHGEIVELPFGKKVRIFTVDEYEQFVKDNYSRTRSKMKKLLMDDIPEEFVTRQLNDSRYISKVVKSLLSNIVREKGEEEAISKNVIPCTGGVTDRLKKDWGINEVWNKIILPRFQRLNELTGTNKFTTKNVGIQEIPTMPLELQKGFNKKRIDHRHHAMDAIIIACANRNIINYLNNESATAKAELSRYDLQKMLCDKAKTDNNGNYKWVIRKPWASFTQDTYLALENIIVSFKQNLRVINKATNRFLHYNEEGKKIFVKQGKGDNWAIRKSMHKDTVFGEVNLRRIKTVALNEAMKNPQSIVVKDFKRKLLELWNLGFDAKRIKKYFEDNRETWSDINLSKIEVYYFSKDTKDRFFATRKPLDTSFDRKKIENNITDTGIQKILLRHLELKDNNPDIAFSPDGIDEMNRNIIQLNNGKYHQPIIKIRWYEQADKFAVGQTGNKFSKFVEAAKGTNLFFAVYESNILDKKTNTIIKKRNYATIPLNVAIERQKQGLPVAPEDENGNDPIFVLSPNDLVYLPTDDELANGIIAQPLDRGRIYKMVSCTGNEGHFIPARIANPILQTIELGSNNKAQKAWTDEMIKEICMPIKVDRLGNVLESSSSYKK

SEQ ID NO: 318 - protein, 1153 aa, Barnesiella intestinihominis
MKNILGLDLGLSSIGWSVIRENSEEQELVAMGSRVVSLTAAELSSFTQGNGVSINSQRTQKRTQRKGYDRYQLRRTLLRNKLDTLGMLPDDSLSYLPKLQLWGLRAKAVTQRIELNELGRVLLHLNQKRGYKSIKSDFSGDKKITDYVKTVKTRYDELKEMRLTIGELFFRRLTENAFFRCKEQVYPRQAYVEEFDCIMNCQRKFYPDILTDETIRCIRDEIIYYQRPLKSCKYLVSRCEFEKRFYLNAAGKKTEAGPKVSPRTSPLFQVCRLWESINNIVVKDRRNEIVFISAEQRAALFDFLNTHEKLKGSDLLKLLGLSKTYGYRLGEQFKTGIQGNKTRVEIERALGNYPDKKRLLQFNLQEESSSMVNTETGEIIPMISLSFEQEPLYRLWHVLYSIDDREQLQSVLRQKFGIDDDEVLERLSAIDLVKAGFGNKSSKAIRRILPFLQLGMNYAEACEAAGYNHSNNYTKAENEARALLDRLPAIKKNELRQPVVEKILNQMVNVVNALMEKYGRFDEIRVELARELKQSKEERSNTYKSINKNQRENEQIAKRIVEYGVPTRSRIQKYKMWEESKHCCIYCGQPVDVGDFLRGFDVEVEHIIPKSLYFDDSFANKVCSCRSCNKEKNNRTAYDYMKSKGEKALSDYVERVNTMYTNNQISKTKWQNLLTPVDKISIDFIDRQLRESQYIARKAKEILTSICYNVTATSGSVTSFLRHVWGWDTVLHDLNFDRYKKVGLTEVIEVNHRGSVIRREQIKDWSKRFDHRHHAIDALTIACTKQAYIQRLNNLRAEEGPDFNKMSLERYIQSQPHFSVAQVREAVDRILVSFRAGKRAVTPGKRYIRKNRKRISVQSVLIPRGALSEESVYGVIHVWEKDEQGHVIQKQRAVMKYPITSINREMLDKEKVVDKRIHRILSGRLAQYNDNPKEAFAKPVYIDKECRIPIRTVRCFAKPAINTLVPLKKDDKGNPVAWVNPGNNHHVAIYRDEDGKYKERTVTFWEAVDRCRVGIPAIVTQPDTIWDNILQRNDISENVLESLPDVKWQFVLSLQQNEMFILGMNEEDYRYAMDQQDYALLNKYLYRVQKLSKSDYSFRYHTETSVEDKYDGKPNLKLSMQMGKLKRVSIKSLLGLNPHKVHISVLGEIKEIS

SEQ ID NO: 319 - protein, 1352 aa, Belliella baltica
MKKILGLDLGTTSIGWAFIKEPEKDVVGSEIVDMGVRIVPLSSDEENDFAKGNTISINADRTLKRGARRNLQRFKQRRNALLEIFKEKKLISTNFKYAEDGPSSTFSTLNLRAKAAKEKIELQDLVKVLLQINKKRGYKSSRKAKSEEDDGSAIDSMGIAKELYENDLTPGQWVYEALQKGRKNVPDFYRSDLQEEFKKIVNYQSEFFPDIFNASFVEDWMGKASTPTKQYFNKKGVQLAENKGKREERRLQEYKWRAEAVNFKIDLSEIALILSQINSQISNSSGYLGAISDRSKELYFKNLTVGQYLYQQIKKNPHTRLKGQVFYRQDYLDEFERIWSVQSSFYPQLNDALKREVRDITIFFQRRLKSQKHLISNCEFEDHHKVVPKSHPVFQEFRIWQNLNNLLLIKKDNLNEKFDLELESKIALANELAFKRELNVKDALKILGLKPNEWEFNFTKIEGNRTNQAFFDAFAKIIELEDGEPIDLGDLKADDILDQFSEAFLRIGIDTELLQVNSDIEGAEYEKQSYIQFWHLLYSSEDDQKLKLNLIRKFGFKPEHAKILASISLQDDHASLSSRAIKKILPHLQSGLIYDKACTYAGYNHSSSFTKDENEKRELRAELELLKKNSLRNPVVEKILNQMINVVNAILKDPELGRPDEIRVEMARELKANAEQRKNMTSNIASATRDHDKYREILKSEFGLKRVTKNDLLRYKLWLETDGISLYTGKPIEASKLFSKEYDIEHIIPKARLFDDSFSNKTICERQLNIDKANVTAFSFLQNKLSADEFEQYQSRVKSLYGKLSKAKIQKLLMANDKIPEDFIARQLQETRYISKKAKEILFEISRRVSVTTGTITDKLREDWGLVEIMKELNWEKYDKLGLTYTIEGKHGERLNKIKDWSKRNDHRHHAMDALTVALTKPAYIQYLNNLNAKGLNNKKGTEVFAIEQKYLKRENGKLCFIPPIENIRSEAKKHLSRILVSYKAKNKVVTINKNKTKSKAGLNEQIALTPRGQLHKETVYGKSFHYSTKFEKIGASFNVQKINTVAKKEEREALLKRLAENGNDPKKAFTGKNTLNKMPIYLDLGKNIKLSEKVKTVVLEQNYTIRKNIDPDLKVDKVIDVGIKRILESRLEEFGGNAKLAFSNLEENPIWLNKEKGISIKRVKISGVSNVESLHVKKDHFGEPILDQEGNEIPVDFVSTGNNHHVAIYEDENGNLQEEVVSFFEAVVRQNQGLPIIKKNHTLGWKFLFTLKQNEYFVFPSDDFVPADVDLMDEQNYHLISPNLFRVQKIARKNYVFNNHLETKAVDNDLLKSKKELSKITYHFYQTPEHLRGIIKIRINHLGKIIQIGEY

SEQ ID NO: 320 - protein, 1415 aa, Bergeyella zoohelcum
MKHILGLDLGTNSIGWALIERNIEEKYGKIIGMGSRIVPMGAELSKFEQGQAQTKNADRRTNRGARRLNKRYKQRRNKLIYILQKLDMLPSQIKLKEDFSDPNKIDKITILPISKKQEQLTAFDLVSLRVKALTEKVGLEDLGKIIYKYNQLRGYAGGSLEPEKEDIFDEEQSKDKKNKSFIAFSKIVFLGEPQEEIFKNKKLNRRAIIVETEEGNFEGSTFLENIKVGDSLELLINISASKSGDTITIKLPNKTNWRKKMENIENQLKEKSKEMGREFYISEFLLELLKENRWAKIRNNTILRARYESEFEAIWNEQVKHYPFLENLDKKTLIEIVSFIFPGEKESQKKYRELGLEKGLKYIIKNQVVFYQRELKDQSHLISDCRYEPNEKAIAKSHPVFQEYKVWEQINKLIVNTKIEAGTNRKGEKKYKYIDRPIPTALKEWIFEELQNKKEITFSAIFKKLKAEFDLREGIDFLNGMSPKDKLKGNETKLQLQKSLGELWDVLGLDSINRQIELWNILYNEKGNEYDLTSDRTSKVLEFINKYGNNIVDDNAEETAIRISKIKFARAYSSLSLKAVERILPLVRAGKYFNNDFSQQLQSKILKLLNENVEDPFAKAAQTYLDNNQSVLSEGGVGNSIATILVYDKHTAKEYSHDELYKSYKEINLLKQGDLRNPLVEQIINEALVLIRDIWKNYGIKPNEIRVELARDLKNSAKERATIHKRNKDNQTINNKIKETLVKNKKELSLANIEKVKLWEAQRHLSPYTGQPIPLSDLFDKEKYDVDHIIPISRYFDDSFTNKVISEKSVNQEKANRTAMEYFEVGSLKYSIFTKEQFIAHVNEYFSGVKRKNLLATSIPEDPVQRQIKDTQYIAIRVKEELNKIVGNENVKTTTGSITDYLRNHWGLTDKFKLLLKERYEALLESEKFLEAEYDNYKKDFDSRKKEYEEKEVLFEEQELTREEFIKEYKENYIRYKKNKLIIKGWSKRIDHRHHAIDALIVACTEPAHIKRLNDLNKVLQDWLVEHKSEFMPNFEGSNSELLEEILSLPENERTEIFTQIEKFRAIEMPWKGFPEQVEQKLKEIIISHKPKDKLLLQYNKAGDRQIKLRGQLHEGTLYGISQGKEAYRIPLTKFGGSKFATEKNIQKIVSPFLSGFIANHLKEYNNKKEEAFSAEGIMDLNNKLAQYRNEKGELKPHTPISTVKIYYKDPSKNKKKKDEEDLSLQKLDREKAFNEKLYVKTGDNYLFAVLEGEIKTKKTSQIKRLYDIISFFDATNFLKEEFRNAPDKKTFDKDLLFRQYFEERNKAKLLFTLKQGDFVYLPNENEEVILDKESPLYNQYWGDLKERGKNIYVVQKFSKKQIYFIKHTIADIIKKDVEFGSQNCYETVEGRSIKENCFKLEIDRLGNIVKVIKR

SEQ ID NO: 321 - protein, 1430 aa, Bergeyella zoohelcum
MKHILGLDLGTNSIGWAVVKEAQNDNEQSEIVDVGVRVNPLTTDEKTNFEKGKPISTNADRTLKRSARRNLQRYKLRRKELIELLKEHQLISTDTILTENGKGTTFQTLELRAKSAKEKISLEELARVFLTINKKRGYKSSRKAKNEDEGQLIDGMEIAKRLYEENLTTGQLSLQLLKEGKKSLPDYYRSDLQFELDKVWNFQKQFHSDILTDEFYAQLKGKGQRATSALFLAKYQIYTAENKGSREDKKLQAYQWRVDALSKELTREQLAFVITEINNNLNNSSGYLGAISDRSKELYFNNETVGEYLWKQIAANPHTSLKNQVFYRQDYLDEFEQIWKTQSAFYPEILTDELKKELRDVVIFYQRKLKSQKSLVSFCEFENKEIEIKKEDGTSTKKVIGLKVAPKSSPLFQEFKIWQNLNNVLIRKKGSKTKKVAKNQQAVLFEEEKTISELDLEAKQALFNELNLKGNLKADYCLEILGYSPKEWEMNYSVLEGNRTNKALYEAYLKITDLEGYDAKNHLKVKLNKDEVELDDLKVPASEIKDMVQAIFKEAGINTDILHFNAELDGKDFENQASYQLWHLLYSYEGDDSKSGNELLYKLLETKFGFKKEYAQILANVSLSDDYGSLSTKAMRKIHPYIKENKFSTACELAGYRHSKHSLTKEENDNRVLKDSLEVLKKNSLRQPVVEKILNQMINLVNALLKKYRTENPNFKFDEIRIELARELKKNAEERANMTANINKAKTEHEKIIKILKNEFGLPNPTRNDIIRYRLYEELKANGYKDLYTNIKIPQEKLFTKEIDIEHIIPKSRVFDDSFSNKTLSFRKTNLDKGERTAFDYMESKFGADKLEEYVARVEDLYKNNIISKAKYQKLLKKESEIGDGFVERDLRETQYIAKKAKEILLQITPNVLSTSGGITDRLREDWDLINVMKELNLPKYRALGLTQMEDRKYGQQVEVITDWTKRNDHRHHAMDALTVAFTKHNHIQYLNYLNARKNEKHKEHSNIMGIQQLETIKVTDKNGNEKRVFKAPMPNFRQVTKAFLENILISHKAKNKVVTKNKNKVAGSNKVQEVLTPRGQLHKETVYGKYQYYVQKEEKIGAKFDLETIKKVANPLYQSLLKKRLEENGGDPKKAFTGKNSLAKNPIYLDDTQTEQLPEKVKLVWLENSFSIRKDITPENFKDEKLIDKILDEGVKRILKERLQSFGNDAKKAFSDLDKNPIWLNKEKGITIKRVTISGVANAEPLHTKKDHLGKEILDKEGKPIPVDFISTGSNHHVAVYRDEKGNLQEKVVSVFEAVVRANQGLPIIDKTYNQHLGWEFLFTMKQNEMFVFPNESTGFNPNDIDLLDPKNKRIISPNLFRVQKFSKLQYGNSFVREFVFRHHLETTVEDRKELQGITYKQMKNSTFFNDIIKVRINHLGDIVSIGEY

SEQ ID NO: 322 - protein, 1281 aa, Bifidobacterium bifidum
MEDDSQHDIREIYLAIHHMVKYRGNFLVEGTLESSNAFKEDELLKLLGRITRYEMSEGEQNSDIEQDDENKLVAPANGQLADALCATRGSRSMRVDNALEALSAVNDLSREQRAIVKAIFAGLEGNKLDLAKIFVSKEFSSENKKILGIYFNKSDYEEKCVQIVDSGLLDDEEREFLDRMQGQYNAIALKQLLGRSTSVSDSKCASYDAHRANWNLIKLQLRTKENEKDINENYGILVGWKIDSGQRKSVRGESAYENMRKKANVFFKKMIETSDLSETDKNRLIHDIEEDKLFPIQRDSDNGVIPHQLHQNELKQIIKKQGKYYPFLLDAFEKDGKQINKIEGLLAFRVPYFVGPLVVPEDLQKSDNSENHWMVRKKKGEITPWNFDEMVDKDASGRKFIERLVGTDSYLLGEPTLPKNSLLYQEYEVLNELNNVRLSVRTGNHWNDKRRMRLGREEKTLLCQRLFMKGQTVTKRTAENLLRKEYGRTYELSGLSDESKFTSSLSTYGKMCRIFGEKYVNEHRDLMEKIVELQTVFEDKETLLHQLRQLEGISEADCALLVNTHYTGWGRLSRKLLTTKAGECKISDDFAPRKHSIIEIMRAEDRNLMEIITDKQLGFSDWIEQENLGAENGSSLMEVVDDLRVSPKVKRGIIQSIRLIDDISKAVGKRPSRIFLELADDIQPSGRTISRKSRLQDLYRNANLGKEFKGIADELNACSDKDLQDDRLFLYYTQLGKDMYTGEELDLDRLSSAYDIDHIIPQAVTQNDSIDNRVLVARAENARKTDSFTYMPQIADRMRNFWQILLDNGLISRVKFERLTRQNEFSEREKERFVQRSLVETRQIMKNVATLMRQRYGNSAAVIGLNAELTKEMHRYLGFSHKNRDINDYHHAQDALCVGIAGQFAANRGFFADGEVSDGAQNSYNQYLRDYLRGYREKLSAEDRKQGRAFGFIVGSMRSQDEQKRVNPRTGEVVWSEEDKDYLRKVMNYRKMLVTQKVGDDFGALYDETRYAATDPKGIKGIPFDGAKQDTSLYGGFSSAKPAYAVLIESKGKTRLVNVTMQEYSLLGDRPSDDELRKVLAKKKSEYAKANILLRHVPKMQLIRYGGGLMVIKSAGELNNAQQLWLPYEEYCYFDDLSQGKGSLEKDDLKKLLDSILGSVQCLYPWHRFTEEELADLHVAFDKLPEDEKKNVITGIVSALHADAKTANLSIVGMTGSWRRMNNKSGYTFSDEDEFIFQSPSGLFEKRVTVGELKRKAKKEVNSKYRTNEKRLPTLSGASQP

SEQ ID NO: 323 - protein, 1121 aa, Bifidobacterium dentium
MSVGLAAIEVDETGFPIRILNIQSVIHDGGIDPQLGKKKSISRKAISGVARRTRRMRRRKVVRLRQLDATLESLGFPIVEPDSLDTWEIWLTRAKLASSYIQDDETRKEDVSIALRHIARHRGWRNPYSNVESLFVDVAPSEQYEELRRKAEEKLGTSLSGNPTSAEIVECILKRQVGEVQLRTRSRKGVNGNAVEKEGLLPTKLMQSDNAAEIRRIFKVQRIDDETGRKLLRAVFKACSPKGSVERRVGRDALAPGLPRALKASLAFQEYRIANVLTNLVISEDGTKRKLTIAEKQRVFGFLSSNETDDITWIDVAEKLGLERRQIQGVGCLTADGEERISSTPPRNITALHIHSAKPVIREKLVAWWKAASPTVRETMVELLSNTVDIDRVREDMDYSSAVAFIDSLGDEELTALDSVDLLSGRAAYSRQTLKQLTERMLNTDDDLHEARKAVFGVDDNWKPPVDAISTSVGNPAVDRVLKIVNRYLLACQKRWRNPQSVQIEHVRESFSSVAKAKETERVQGERARYRNDLRRELCEQEGLNKIRESDIRRWESVQRQNGTCLYCGSPITFRTCEMDHIVPRKGVGSTNTRVNLAAACAACNKLKSNTAFSVWARTEGAANRKVSQRDAIERVKTFIFNKSVPPREQRAFKQAVISRLRQAESDPAIDNRSIESVAWMADELHRRIEAYFNQDADVSGNTPATQVWVFQGRVTALARKASGIEGRIHFAGEWKKTRLDRRHHAVDAAVIAMMNHSAAQTLVERDSLRLSQWITRKPETWKNYPFSEGQKKTRFKEWLDCMNALLDLLNDALDSDRVPVTRCQRMSLGNSQAHAATIRKMKRVELFSPMDADLIRRASTPALYCALTRLPEYSPEKGLPENRGREIVLNGRHIRSTETVDFFASGAAQLMVRNGSAEIGDSIHHMRIYRYRKTGAKSQEYVYGMIRVFQIDLLHASSENLFAVQLPSQSVSVRYGDKNVVQAIQEGRAEYLGHIVPNDEILISYEGVRMKDSEKIGAYANDFSGTASELAQRRHWVVVGSDVSKLALRPSYLSEEGLENSGSESERLSKQTRKVIEGKGWVVAVNILAKYHPVVIRRNALGEPRFRTNSGMPVSWRWDR

SEQ ID NO: 324 - protein, 354 aa, Bifidobacterium longum
AKQYVNSASIDDAEAETMKTTVSVFQGRVTASARRAAGIEGKIHFIGQQSKTRLDRRHHAVDASVIAMMNTAAAQTLMERESLRESQRLIGLMPGERSWKEYPYEGTSRYESFHLWLDNMDVLLELLNDALDNDRIAVMQSQRYVLGNSIAHDATIHPLEKVPLGSAMSADLIRRASTPALWCALTRLPDYDEKEGLPEDSHREIRVHDTRYSADDEMGFFASQAAQIAVQEGSADIGSAIHHARVYRCWKTNAKGVRKYFYGMIRVFQTDLLRACHDDLFTVPLPPQSISMRYGEPRVVQALQSGNAQYLGSLVVGDEIEMDFSSLDVDGQIGEYLQFFSQFSGGNLAWKHWV

SEQ ID NO: 325 - protein, 1124 aa, Bifidobacterium longum
LTGHSGHTFWPTSSSPPIQLEQEKRPLPQRNTSQNGHTFWPITRERCFMRGKRYRIGIDVGLNSVGLAAVEVSDENSPVRLLNAQSVIHDGGVDPQKNKEAITRKNMSGVARRTRRMRRRKRERLHKLDMLLGKFGYPVIEPESLDKPFEEWHVRAELATRYIEDDELRRESISIALRHMARHRGWRNPYRQVDSLISDNPYSKQYGELKEKAKAYNDDATAAEEESTPAQLVVAMLDAGYAEAPRLRWRTGSKKPDAEGYLPVRLMQEDNANELKQIFRVQRVPADEWKPLFRSVFYAVSPKGSAEQRVGQDPLAPEQARALKASLAFQEYRIANVITNLRIKDASAELRKLTVDEKQSIYDQLVSPSSEDITWSDLCDFLGFKRSQLKGVGSLTEDGEERISSRPPRLTSVQRIYESDNKIRKPLVAWWKSASDNEHEAMIRLLSNTVDIDKVREDVAYASAIEFIDGLDDDALTKLDSVDLPSGRAAYSVETLQKLTRQMLTTDDDLHEARKTLFNVTDSWRPPADPIGEPLGNPSVDRVLKNVNRYLMNCQQRWGNPVSVNIEHVRSSFSSVAFARKDKREYEKNNEKRSIFRSSLSEQLRADEQMEKVRESDLRRLEAIQRQNGQCLYCGRTITFRTCEMDHIVPRKGVGSTNTRTNFAAVCAECNRMKSNTPFAIWARSEDAQTRGVSLAEAKKRVTMFTFNPKSYAPREVKAFKQAVIARLQQTEDDAAIDNRSIESVAWMADELHRRIDWYFNAKQYVNSASIDDAEAETMKTTVSVFQGRVTASARRAAGIEGKIHFIGQQSKTRLDRRHHAVDASVIAMMNTAAAQTLMERESLRESQRLIGLMPGERSWKEYPYEGTSRYESFHLWLDNMDVLLELLNDALDNDRIAVMQSQRYVLGNSIAHDATIHPLEKVPLGSAMSADLIRRASTPALWCALTRLPDYDEKEGLPEDSHREIRVHDTRYSADDEMGFFASQAAQIAVQEGSADIGSAIHHARVYRCWKTNAKGVRKYFYGMIRVFQTDLLRACHDDLFTVPLPPQSISMRYGEPRVVQALQSGNAQYLGSLVVGDEIEMDFPVSMLMVRLASIYNSSRSLVEGTLHGNIGLLMDSLTRRS

SEQ ID NO: 326 - protein, 166 aa, Bifidobacterium longum
MGLAAVEVSDENSPVRLLNAQSVIHDGGVDPQKNKEAITRKNMSGVARRTRRMRRRKRERLHKLDMLLGKFGYPVIEPESLDKPFEEWHVRAELATRYIEDDELRRESISIALRHMARHRGWRNPYRQVDSLISDNPYSKQYGELKEKAKAYNDDATAAEEESTPA

SEQ ID NO: 327 - protein, 1138 aa, Bifidobacterium longum
MNSVGLAAVEVSDENSPVRLLNAQSVIHDGGVDPQKNKEAITRKNMSGVARRTRRMRRRKRERLHKLDMLLGKFGYPVIEPESLDKPFEEWHVRAELATRYIEDDELRRESISIALRHMARHRGWRNPYRQVDSLISDNPYSKQYGELKEKAKAYNDDATAAEEESTPAQLVVAMLDAGYAEAPRLRWRTGSKKPDAEGYLPVRLMQEDNANELKQIFRVQRVPADEWKPLFRSVFYAVSPKGSAEQRVGQDPLAPEQARALKASLAFQEYRIANVITNLRIKDASAELRKLTVDEKQSIYDQLVSPSSEDITWSDLCDFLGFKRSQLKGVGSLTEDGEERISSRPPRLTSVQRIYESDNKIRKPLVAWWKSASDNEHEAMIRLLSNTVDIDKVREDVAYASAIEFIDGLDDDALTKLDSVDLPSGRAAYSVETLQKLTRQMLTTDDDLHEARKTLFNVTDSWRPPADPIGEPLGNPSVDRVLKNVNRYLMNCQQRWGNPVSVNIEHVRSSFSSVAFARKDKREYEKNNEKRSIFRSSLSEQLRADEQMEKVRESDLRRLEAIQRQNGQCLYCGRTITFRTCEMDHIVPRKGVGSTNTRTNFAAVCAECNRMKSNTPFAIWARSEDAQTRGVSLAEAKKRVTMFTFNPKSYAPREVKAFKQAVIARLQQTEDDAAIDNRSIESVAWMADELHRRIDWYFNAKQYVNSASIDDAEAETMKTTVSVFQGRVTASARRAAGIEGKIHFIGQQSKTRLDRRHHAVDASVIAMMNTAAAQTLMERESLRESQRLIGLMPGERSWKEYPYEGTSRYESFHLWLDNMDVLLELLNDALDNDRIAVMQSQRYVLGNSIAHDATIHPLEKVPLGSAMSADLIRRASTPALWCALTRLPDYDEKEGLPEDSHREIRVHDTRYSADDEMGFFASQAAQIAVQEGSADIGSAIHHARVYRCWKTNAKGVRKYFYGMIRVFQTDLLRACHDDLFTVPLPPQSISMRYGEPRVVQALQSGNAQYLGSLVVGDEIEMDFSSLDVDGQIGEYLQFFSQFSGGNLAWKHWVVDGFFNQTQLRIRPRYLAAEGLAKAFSDDVVPDGVQKIVTKQGWLPPVNTASKTAVRIVRRNAFGEPRLSSAHHMPCSWQWRHE

SEQ ID NO: 328 - protein, 182 aa, Bifidobacterium longum
MRGKRYRIGIDVGLNSVGLAAVEVSDENSPVRLLNAQSVIHDGGVDPQKNKEAITRKNMSGVARRTRRMRRRKRERLHKLDMLLGKFGYPVIEPESLDKPFEEWHVRAELATRYIEDDELRRESISIALRHMARHRGWRNPYRQVDSLISDNPYSKQYGELKEKAKAYNDDATAAEEESTPA

SEQ ID NO: 329 - protein, 441 aa, Bifidobacterium longum
MVAMLDAGYAEAPRLRWRTGSKKPDAEGYLPVRLMQEDNANELKQIFRVQRVPADEWKPLFRSVFYAVSPKGSAEQRVGQDPLAPEQARALKASLAFQEYRIANVITNLRIKDASAELRKLTVDEKQSIYDQLVSPSSEDITWSDLCDFLGFKRSQLKGVGSLTEDGEERISSRPPRLTSVQRIYESDNKIRKPLVAWWKSASDNEHEAMIRLLSNTVDIDKVREDVAYASAIEFIDGLDDDALTKLDSVDLPSGRAAYSVETLQKLTRQMLTTDDDLHEARKTLFNVTDSWRPPADPIGEPLGNPSVDRVLKNVNRYLMNCQQRWGNPVSVNIEHVRSSFSSVAFARKDKREYEKNNEKRSIFRSSLSEQLRADEQMEKVRESDLRRLEAIQRQNGQCLYCGRTITFRTCEMDHIVPRKGVGSTNTRTNFAAVCAECNRM

SEQ ID NO: 330 - protein, 967 aa, Bifidobacterium longum
MVAMLDAGYAEAPRLRWRTGSKKPDAEGYLPVRLMQEDNANELKQIFRVQRVPADEWKPLFRSVFYAVSPKGSAEQRVGQDPLAPEQARALKASLAFQEYRIANVITNLRIKDASAELRKLTVDEKQSIYDQLVSPSSEDITWSDLCDFLGFKRSQLKGVGSLTEDGEERISSRPPRLTSVQRIYESDNKIRKPLVAWWKSASDNEHEAMIRLLSNTVDIDKVREDVAYASAIEFIDGLDDDALTKLDSVDLPSGRAAYSVETLQKLTRQMLTTDDDLHEARKTLFNVTDSWRPPADPIGEPLGNPSVDRVLKNVNRYLMNCQQRWGNPVSVNIEHVRSSFSSVAFARKDKREYEKNNEKRSIFRSSLSEQLRADEQMEKVRESDLRRLEAIQRQNGQCLYCGRTITFRTCEMDHIVPRKGVGSTNTRTNFAAVCAECNRMKSNTPFAIWARSEDAQTRGVSLAEAKKRVTMFTFNPKSYAPREVKAFKQAVIARLQQTEDDAAIDNRSIESVAWMADELHRRIDWYFNAKQYVNSASIDDAEAETMKTTVSVFQGRVTASARRAAGIEGKIHFIGQQSKTRLDRRHHAVDASVIAMMNTAAAQTLMERESLRESQRLIGLMPGERSWKEYPYEGTSRYESFHLWLDNMDVLLELLNDALDNDRIAVMQSQRYVLGNSIAHDATIHPLEKVPLGSAMSADLIRRASTPALWCALTRLPDYDEKEGLPEDSHREIRVHDTRYSADDEMGFFASQAAQIAVQEGSADIGSAIHHARVYRCWKTNAKGVRKYFYGMIRVFQTDLLRACHDDLFTVPLPPQSISMRYGEPRVVQALQSGNAQYLGSLVVGDEIEMDFSSLDVDGQIGEYLQFFSQFSGGNLAWKHWVVDGFFNQTQLRIRPRYLAAEGLAKAFSDDVVPDGVQKIVTKQGWLPPVNTASKTAVRIVRRNAFGEPRLSSAHHMPCSWQWRHE

SEQ ID NO: 331 - protein, 1151 aa, Bifidobacterium sp.
MRGKRYRIGIDVGLNSVGLAAVEVSDENSPVRLLNAQSVIHDGGVDPQKNKEAITRKNMSGVARRTRRMRRRKRERLHKLDMLLGKFGYPVIEPESLDKPFEEWHVRAELATRYIEDDELRRESISIALRHMARHRGWRNPYRQVDSLISDNPYSKQYGELKEKAKAYNDDATAAEEESTPAQLVVAMLDAGYAEAPRLRWRTGSKKPDAEGYLPVRLMQEDNANELKQIFRVQRVPADEWKPLFRSVFYAVSPKGSAEQRVGQDPLAPEQARALKASLAFQEYRIANVITNLRIKDASAELRKLTVDEKQSIYDQLVSPSSEDITWSDLCDFLGFKRSQLKGVGSLTEDGEERISSRPPRLTSVQRIYESDNKIRKPLVAWWKSASDNEHEAMIRLLSNTVDIDKVREDVAYASAIEFIDGLDDDALTKLDSVDLPSGRAAYSVETLQKLTRQMLTTDDDLHEARKTLFNVTDSWRPPADPIGEPLGNPSVDRVLKNVNRYLMNCQQRWGNPVSVNIEHVRSSFSSVAFARKDKREYEKNNEKRSIFRSSLSEQLRADEQMEKVRESDLRRLEAIQRQNGQCLYCGRTITFRTCEMDHIVPRKGVGSTNTRTNFAAVCAECNRMKSNTPFAIWARSEDAQTRGVSLAEAKKRVTMFTFNPKSYAPREVKAFKQAVIARLQQTEDDAAIDNRSIESVAWMADELHRRIDWYFNAKQYVNSASIDDAEAETMKTTVSVFQGRVTASARRAAGIEGKIHFIGQQSKTRLDRRHHAVDASVIAMMNTAAAQTLMERESLRESQRLIGLMPGERSWKEYPYEGTSRYESFHLWLDNMDVLLELLNDALDNDRIAVMQSQRYVLGNSIAHDATIHPLEKVPLGSAMSADLIRRASTPALWCALTRLPDYDEKEGLPEDSHREIRVHDTRYSADDEMGFFASQAAQIAVQEGSADIGSAIHHARVYRCWKTNAKGVRKYFYGMIRVFQTDLLRACHDDLFTVPLPPQSISMRYGEPRVVQALQSGNAQYLGSLVVGDEIEMDFSSLDVDGQIGEYLQFFSQFSGGNLAWKHWVVDGFFNQTQLRIRPRYLAAEGLAKAFSDDVVPDGVQKIVTKQGWLPPVNTASKTAVRIVRRNAFGEPRLSSAHHMPCSWQWRHE

SEQ ID NO: 332 - protein, 1092 aa, Brevibacillus laterosporus
MAYTMGIDVGIASCGWAIVDLERQRIIDIGVRTFEKAENPKNGEALAVPRREARSSRRRLRRKKHRIERLKYMFVRNGLAVDIQHLEQTLRSQNEIDVWQLRVDGLDRMLTQKEWLRVLIHLAQRRGFQSNRKTDGSSEDGQVLVNVTENDRLMEEKDYRTVAEMMVKDEKFSDHKRNKNGNYHGVVSRASLLVEIHTLFESQRQHHNFLASKDFELEYINIWSSQRPVATKDQIEKMIGTCTFLPKEKRAPKASWHFQYFMLLQTINHIRITNAQGTRPLNKEEIEQVVNMALTKSKVSYHDIRKVLDLSEEYQFVGLDYGKEDEKKKVESKETIIKLDDYHKLNKIFNEVELAKGETWEAVDYDTVAYALTFFKDDEDIRDYLQNKYKDSKNRLVKNVANKEYTNELIEKVSTLSFRKVGHLSLKALRKIIPFLEQGMTYDKACQAAGFNFQGISKKKRSVVLPVIDQISNPVVNRALTQTRKVINALIKKYGSPETIHIETARELSKRFDERKNITKDYKENRDKNERAKKHLSELGIINPTGLDIVKYKLWCEQQGRCMYSNQPISFERLRESGYTEVDHIIPYSRSMNDSYNNRVLVMTRENREKSNQTPYEYMGNDTQRWDEFEQRVTTNPQIKKEKRQNLLLKGFTNRRELEMLERNLNDTRHITKYLSHFISTNLEFSPSDKKKKVVNTSGRITSHLRSRWGLEKNREQNDLHHAMDAVVIAVTSDSFIQQVTNYYKRKERRELNGDDKFPLPWKFFREEVIARLSPNPKEQIEALPNHFYSEDELADLQPIFVSRMPKRSITGEAHQAQFRRVVGKTKEGKNITAKKTALVDISYDKNGDFNMYGRETDPATYEAIKERYLEFGGNAKKAFSTDLHKPKKDGTKGPLIKSVRIMENKTLVHPVNKGKGVVYNSSIVRTDVFQRKEKYYLLPVYVTDVTKGKLPNKVIAAKKGYDDWIEVDDSFTFLYSLYPNDLIFIRQNPKKKISLKKRIESHSISDSKEVQEILTYYKGVDSSTAAIEFITHDGSYYAKGVGVQNLDCFEKYQVDILGNYSKVKGEKRLELETSDNNHKGKDVNSIKSTSR

SEQ ID NO: 333 - protein, 103 aa, Butyrivibrio fibrisolvens
MISVGQSRKDLEDLGYEFKLSFYKEDIIEYEKNGDILVERFLSRTMPQVRNYIETKPIDRPKYDKRNPVGLSKTSSIRKITMDILGNRFYVDKMSFNNVVGTQ

SEQ ID NO: 334 - protein, 177 aa, Butyrivibrio fibrisolvens
MLIAFSQMGYDAYHELTNKYIDFETGEIIDKEGFNELLNNDLVYKNTMYESKWLKIKGNIEKAAEKNKYWYQVNKKCNRGLCNQTVYGTRESDGDVYKISKIDIRTDDGFKKFKNIVDKGNESVFLMYENDPKTFELIMDIYKNYSDSKNPFVQYEKETGDIIRKYSKKITGQRFLN

SEQ ID NO: 335 - protein, 1442 aa, Caenispirillum salinarum
MPVLSPLSPNAAQGRRRWSLALDIGEGSIGWAVAEVDAEGRVLQLTGTGVTLFPSAWSNENGTYVAHGAADRAVRGQQQRHDSRRRRLAGLARLCAPVLERSPEDLKDLTRTPPKADPRAIFFLRADAARRPLDGPELFRVLHHMAAHRGIRLAELQEVDPPPESDADDAAPAATEDEDGTRRAAADERAFRRLMAEHMHRHGTQPTCGEIMAGRLRETPAGAQPVTRARDGLRVGGGVAVPTRALIEQEFDAIRAIQAPRHPDLPWDSLRRLVLDQAPIAVPPATPCLFLEELRRRGETFQGRTITREAIDRGLTVDPLIQALRIRETVGNLRLHERITEPDGRQRYVPRAMPELGLSHGELTAPERDTLVRALMHDPDGLAAKDGRIPYTRLRKLIGYDNSPVCFAQERDTSGGGITVNPTDPLMARWIDGWVDLPLKARSLYVRDVVARGADSAALARLLAEGAHGVPPVAAAAVPAATAAILESDIMQPGRYSVCPWAAEAILDAWANAPTEGFYDVTRGLFGFAPGEIVLEDLRRARGALLAHLPRTMAAARTPNRAAQQRGPLPAYESVIPSQLITSLRRAHKGRAADWSAADPEERNPFLRTWTGNAATDHILNQVRKTANEVITKYGNRRGWDPLPSRITVELAREAKHGVIRRNEIAKENRENEGRRKKESAALDTFCQDNTVSWQAGGLPKERAALRLRLAQRQEFFCPYCAERPKLRATDLFSPAETEIDHVIERRMGGDGPDNLVLAHKDCNNAKGKKTPHEHAGDLLDSPALAALWQGWRKENADRLKGKGHKARTPREDKDFMDRVGWRFEEDARAKAEENQERRGRRMLHDTARATRLARLYLAAAVMPEDPAEIGAPPVETPPSPEDPTGYTAIYRTISRVQPVNGSVTHMLRQRLLQRDKNRDYQTHHAEDACLLLLAGPAVVQAFNTEAAQHGADAPDDRPVDLMPTSDAYHQQRRARALGRVPLATVDAALADIVMPESDRQDPETGRVHWRLTRAGRGLKRRIDDLTRNCVILSRPRRPSETGTPGALHNATHYGRREITVDGRTDTVVTQRMNARDLVALLDNAKIVPAARLDAAAPGDTILKEICTEIADRHDRVVDPEGTHARRWISARLAALVPAHAEAVARDIAELADLDALADADRTPEQEARRSALRQSPYLGRAISAKKADGRARAREQEILTRALLDPHWGPRGLRHLIMREARAPSLVRIRANKTDAFGRPVPDAAVWVKTDGNAVSQLWRLTSVVTDDGRRIPLPKPIEKRIEISNLEYARLNGLDEGAGVTGNNAPPRPLRQDIDRLTPLWRDHGTAPGGYLGTAVGELEDKARSALRGKAMRQTLTDAGITAEAGWRLDSEGAVCDLEVAKGDTVKKDGKTYKVGVITQGIFGMPVDAAGSAPRTPEDCEKFEEQYGIKPWKAKGIPLA

SEQ ID NO: 336 - protein, 984 aa, Campylobacter coli
MARILAFDIGISSIGWAFSENDELKDCGVRIFTKAENPKTGESLALPRRLARSARKCLARRKARLNHLKHLIANEFKLNYEDYQSFDESLAKAYKGSLISPYELRFRALNELLSKQDFARVILHIAKRRGYDDIKNNGDEEKSEILKAIKQNEEKLVNYQSVGEYLYKEYFQKFKENSKEFINVRNKKESYERCIAQSFLKDELKLIFQKQREFGFSFSKKFEEEVLSVAFYKRALKDFSHLVGNCSFFTDEKRAPKNSPLAFMFVALTRIINLLNNLKNTEGILYTKDDLNALLNEVLKNGTLTYKQTKKLLGLSDDYEFKGEKGTYFIEFKKYKEFIKALGEHNLSQDDLNEIAKDITLIKDEIKLKKALAKYDLNQNQIDSLSKLEFKDHLNISFKALKLITPLMLEGKKYDEACNELNLKVAINEDKKDFLPAFNETYYKDEVTNPVVLRAIKEYRKVLNALLKKYGKVHKINIELAREVGKNHSQRAKIEKEQNENYKAKKDAELECEKLGLKINSKNILKLRLFKEQKEFCAYSGEKIKISDLQDEKMLEIDHIYPYSRSFDDSYMNKVLVFTKQNQEKLNQTPFEAFGNDSAKWQKIEVLAKNLPTKKQKRILDKNYKDKEQKNFKDRNLNDTRYIARLVLNYTKDYLDFLPLSDDENTKLNDTQKGSKVHVEAKSGMLTSALRHTWGFSAKDRNNHLHHAIDAVIIAYANNSIVKAFSDFKKEQESNSAELYAKKISELDYKNKRKFFEPFSGFRQKVLDKIDEIFVSKPERKKPSGALHEETFRKEEEFYQSYGGKEGVLKALELGKIRKVNGKIVKNGDMFRVDIFKHKKTNKFYAVPIYTMDFALKVLPNKAVARSKKGEIKDWILMDENYEFCFSLYKDSLILIQTKDMQEPEFVYYNAFTSSTVSLIVSKHDNKFETLSKNQKILFKNANEKEVIAKSIGIQNLKVFEKYIVSALGEVTKAEFRQREDFKK

SEQ ID NO: 337 - protein, 984 aa, Campylobacter coli
MARILAFDIGISSIGWAFSENDELKDCGVRIFTKAENPKTGESLALPRRLARSARKRLARRKARLNHLKHLIANEFKLNYEDYQSFDESLAKAYKGSLISPYELRFRALNELLSKQDFARVILHIAKRRGYDDIKNNGDEEKGKILKAIKQNEEKLVNYQSVGEYLYKEYFQKFKENSKEFINVRNKKESYERCITQSFLKYELKLIFQKQREFGFSFSKKFEEEVLSVAFYKRALKDFSHLVGNCSFFSDEKRAPKNSPLAFMFVALTRIINLLNNLKNTEGILYTKDDLNALLNEVLKNGTLTYKQTKKLLGLSDDYEFKGEKGTYFIEFKKYKEFIKALGEHNLSQDDLNEIAKDITLIKDEIKLKKALAKYDLNQNQIDSLSKLEFKDHLNISFKALKLITPLMLEGKKYDEACNELNLKVAINEDKKDFLPAFNETYYKDEVTNPVVLRAIKEYRKVLNALLKKYGKVHKINIELAREVGKNYSQRAKIEKEQNENYKAKKDAELECEKLGLKINSKNILKLRLFKEQKEFCAYSGEKIKISDLQDEKMLEIDHIYPYSRSFDDSYMNKVLVFTKQNQEKLNQTPFEAFGNDSAKWQKIEVLAKNLPTKKQKRILDKNYKDKEQKNFKDRNLNDTRYIARLVLNYTKDYLDFLPLSDDENTKLNDTQKGSKVHVEAKSGMLTSALRHTWGFSAKDRNNHLHHAIDAVIIAYANNSIVKAFSDFKKEQESNSAELYAKKISELDYKNKRKFFEPFSGFRQKVLDKIDEIFVSKPERKKPSGALHEETFRKEEEFYQSYGGKEGVLKALELGKIRKVNGKIVKNGDMFRVDIFKHKKTNKFYAVPIYTMDFALKVLPNKAVARSKKGEIKDWILMDENYEFCFSLYKDSLILIQTKDMQEPEFVYYNAFTSSTVSLIVSKHDNKFETLSKNQKILFKNANEKEVIAKSIGIQNLKVFEKYIVSALGEVTKAEFRQREDFKK

SEQ ID NO: 338 - protein, 984 aa, Campylobacter coli
MARILAFDIGISSIGWAFSENDELKDCGVRIFTKAENPKTGESLALPRRLARSARKRLARRKARLNHLKHLIANEFKLNYEDYQSFDESLAKAYKGSLISPYELRFRALNELLSKQDFARVILHIAKRRGYDDIKNNGDEEKSEILKAIKQNEEKLVNYQSVGEYLYKEYFQKFKENSKEFINVRNKKESYERCIAQSFLKDELKLIFQKQREFGFSFSKKFEEEVLSVAFYKRALKDFSHLVGNCSFFTDEKRAPKNSPLAFMFVALTRIINLLNNLKNTEGILYTKDDLNTLLNEVLKNGTLTYKQTKKLLGLSDDYEFKGEKGTYFIEFKKYKEFIKALGEHNLSQDNLNEIAKDITLIKDEIKLKKALAKYDLNQNQIDSLSKLEFKDHLNISFKALKLITPLMLEGKKYDEAYNELNLKVAINEDKKDFLPAFNETYYKDEVTNPVVLRAIKEYRKVLNALLKKYGKVHKINIELAREVGKNHSQRAKIEKEQNENYKAKKDAELECEKLGLKINSKNILKLRLFKEQKEFCAYSGEKIKISDLQDEKMLEIDHIYPYSRSFDDSYMNKVLVFTKQNQEKLNQTPFEAFGNDSAKWQKIEVLAKNLPTKKQKRILDKNYKDKEQKDFKDRNLNDTRYIARLVLNYTKDYLDFLPLSDDENTKLNDTQKGSKVHVEAKSGMLTSALRHTWGFSAKDRNNHLHHAIDAVIIAYANNSIVKAFSDFKKEQESNSAELYAKKISELDYKNKRKFFEPFSGFRQKVLDKIDEIFVSKPERKKPSGALHEETFRKEEEFYQSYGGKEGVLKALELGKIRKVNGKIVKNGDMFRVDIFKHKKTNKFYAVPIYTMDFALKVLPNKAVARSKKGEIKDWILMDENYEFCFSLYKDSLILIQTKDMQEPELVYFNAFTSSTVSLIVSKHDNKFETLSKNQKILFKNANEKEVIAKSIGIQNLKVFEKYIVSALGEVTKAEFRQREDFKK

SEQ ID NO: 339 - protein, 984 aa, Campylobacter coli
MARILAFDIGISSIGWAFSENDELKDCGVRIFTKAENPKTGESLALPRRLARSARKRLARRKARLNHLKHLIANEFKLNYEDYQSFDESLAKAYKGSLISPYELRFRALNELLSKQDFARVILHIAKRRGYDDIKNNGDEEKSEILKAIKQNEEKLVNYQSVGEYLYKEYFQKFKENSKEFINVRNKKESYERCIAQSFLKDELKLIFQKQREFGFSFSKKFEEEVLSVAFYKRALKDFSHLVGNCSFFTDEKRAPKNSPLAFMFVALTRIINLLNNLKNTEGILYTKDDLNALLNEVLKNGTLTYKQTKKLLGLSDDYEFKGEKGTYFIEFKKYKEFIKALGEHNLSQDDLNEIAKDITLIKDEIKLKKALAKYDLNQNQIDSLSKLEFKDHLNISFKALKLITPLMLEGKKYDEACNELNLKVAINEDKKDFLPAFNETYYKDEVTNPVVLRAIKEYRKVLNALLKKYGKVHKINIELAREVGKNYSQRAKIEKEQNENYKAKKDAELECEKLGLKINSKNILKLRLFKEQKEFCAYSGEKIKISDLQDEKMLEIDHIYPYSRSFDDSYMNKVLVFTKQNQEKLNQTPFEAFGNDSAKWQKIEVLAKNLPTKKQKRILDKNYKDKEQKNFKDRNLNDTRYIARLVLNYTKDYLDFLPLSDDENTKLNDTQKGSKVHVEAKSGMLTSALRHTWGFSAKDRNNHLHHAIDAVIIAYANNSIVKAFSDFKKEQESNSAELYAKKISELDYKNKRKFFEPFSGFRQKVLDKIDEIFVSKPERKKPSGALHEETFRKEEEFYQSYGGKEGVLKALELGKIRKVNGKIVKNGDMFRVDIFKHKKTNKFYAVPIYTMDFALKVLPNKAVARSKKGEIKDWILMDENYEFCFSLYKDSLILIQTKDMQEPEFVYYNAFTSSTVSLIVSKHDNKFETLSKNQKILFKNANEKEVIAKSIGIQNLKVFEKYIVSALGEVTKAEFRQREDFKK

SEQ ID NO: 340 - protein, 987 aa, Campylobacter coli
MARILAFDIGISSIGWAFSENDELKDCGVRIFTKAENPKTGESLALPRRLARSARKRLARRKARLNHLKHLIANEFKLNYEDYQSFDESLAKAYKGSLISPYELRFRALNELLSKQDFARVILHIAKRRGYDDIKNNGDEEKSEILKAIKQNEEKLVNYQSVGEYLYKEYFQKFKENSKEFINVRNKKESYERCIAQSFLKDELKLIFQKQREFGFSFSKKFEEEVLSVAFYKRALKDFSHLVGNCSFFTDEKRAPKNSPLAFMFVALTRIINLLNNLKNTEGILYTKDDLNTLLNEVLKNGTLTYKQTKKLLGLSDDYEFKGEKGTYFIEFKKYKEFIKALGEHNLSQDNLNEIAKDITLIKDEIKLKKALAKYDLNQNQIDSLSKLEFKDHLNISFKALKLITPLMLEGKKYDEAYNELNLKVAINEDKKDFLPAFNETYYKDEVTNPVVLRAIKEYRKVLNALLKKYGKVHKINIELAREVGKNHSQRAKIEKEQNENYKAKKDAELECEKLGLKINSKNILKLRLFKEQKEFCAYSGEKIKISDLQDEKMLEIDHIYPYSRSFDDSYMNKVLVFTKQNQEKLNQTPFEAFGNDSAKWQKIEVLAKNLPTKKQKRILDKNYKDKEQKDFKDRNLNDTRYIARLVLNYTKDYLDFLPLSDDENTKLNDTQKGSKVHVEAKSGMLTSALRHTWGFSAKDRNNHLHHAIDAVIIAYANNSIVKAFSDFKKEQESNSAELYAKKISELDYKNKRKFFEPFSGFRQKVLDKIDEIFVSKPERKKPSGALHEETFRKEEEFYQSYGGKEGVLKALELGKIRKVNGKIVKNGDMFRVDIFKHKKTNKFYAVPIYTMDFALKVLPNKAVARSKKGEIKDWILMDENYEFCFSLYKDSLILIQTKDMQEPELVYFNAFTSSTVSLIVSKHDNKFETLSKNQKILFKNANEKEVIAKSIGIQNLKVFEKYIVSALGEVTKAEFRQREDFKNELR

SEQ ID NO: 341 - protein, 984 aa, Campylobacter coli
MARILAFDIGISSIGWAFSENDELKDCGVRIFTKAENPKTGESLALPRRLARSARKRLARRKARLNHLKHLIANEFKLNYEDYQSFDESLAKAYKGSLISPYELRFRALNELLSKQDFARVILHIAKRRGYDDIKNNGDEEKSEILKAIKQNEEKLVNYQSVGEYLYKEYFQKFKENSKEFINVRNKKESYERCIAQSFLKDELKLIFQKQREFGFSFSKKFEEEVLSVAFYKRALKDFSHLVGNCSFFTDEKRAPKNSPLAFMFVALTRIINLLNNLKNTEGILYTKDDLNTLLNEVLKNGTLTYKQTKKLLGLSDDYEFKGEKGTYFIEFKKYKEFIKALGEHNLSQDNLNEIAKDITLIKDEIKLKKALAKYDLNQNQIDSLSKLEFKDHLNISFKALKLITPLMLEGKKYDEAYNELNLKVAINEDKKDFLPAFNETYYKDEVTNPVVLRAIKEYRKVLNALLKKYGKVHKINIELAREVGKNHSQRAKIEKEQNENYKAKKDAELECEKLGLKINSKNILKLRLFKEQKEFCAYSGEKIKISDLQDEKMLEIDHIYPYSRSFDDSYMNKVLVFTKQNQEKLNQTPFEAFGNDSAKWQKIEVLAKNLPTKKQKRILDKNYKDKEQKDFKDRNLNDTRYIARLVLNYTKDYLDFLPLSNDENTKLNDTQKGSKVHVEAKSGMLTSALRHTWGFSAKDRNNHLHHAIDAVIIAYANNSIVKAFSDFKKEQESNSAELYAKKISELDYKNKRKFFEPFSGFRQKVLDKIDEIFVSKPERKKPSGALHEETFRKEEEFYQSYGGKEGVLKALELGKIRKVNGKIVKNGDMFRVDIFKHKKTNKFYAVPIYTMDFALKVLPNKAVARSKKGEIKDWILMDENYEFCFSLYKDSLILIQTKDMQEPELVYFNAFTSSTVSLIVSKHDNKFETLSKNQKILFKNANEKEVIAKSIGIQNLKVFEKYIVSALGEVTKAEFRQREDFKK

SEQ ID NO: 342 - protein, 987 aa, Campylobacter coli
MARILAFDIGISSIGWAFSENDELKDCGVRIFTKAENPKTGESLALPRRLARSARKRLARRKARLNHLKHLIANEFKLNYEDYQSFDESLAKAYKGSLISPYELRFRALNELLSKQDFARVILHIAKRRGYDDIKNSDDKEKGAILKAIKQNEEKLANYQSVGEYLYKEYFQKFKENSKEFTNVRNKKESYERCIAQSFLKDELKLIFKKQREFGFSFSKKFEEEVLSVAFYKRALKDFSHLVGNCSFFTDEKRAPKNSPLAFMFVALTRIINLLNNLKNTEGILYTKDDLNALLNEVLKNGTLTYKQTKKLLGLSDDYEFKGEKGTYFIEFKKYKEFIKALGDHSLSQDDLNEIAKDITLIKDEIKLKKALAKYDLNQNQIDSLSKLEFKDHLNISFKALKLITPLMLEGKKYDEACNELNLKVAINEDKKDFLPAFNETYYKDEVTNPVVLRAIKEYRKVLNALLKKYGKVHKINIELAREVGKNYSQRAKIEKEQNENYKAKKDAELECEKLGLKINSKNILKLRLFKEQKEFCAYSGEKIKISDLQDEKMLEIDHIYPYSRSFDDSYMNKVLVFTKQNQEKLNKTPFEAFGNDSTKWQKIEVLAKNLPEKKQKRILDKNYKDKEQKDFKDRNLNDTRYIARLVLNYTKDYLDFLPLSDDENTKLNDTQKGSKVHVEAKSGMLTSALRHTWGFSTKDRNNHLHHAIDAVIIAYANNSIVKAFSDFKKEQESNSAELYAKKISELDYKNKRKFFEPFSGFRQKVLDKIDEIFVSKPERKKPSGALHEETFRKEEEFYQSYGGKEGVLKALELGKIRKVNGKIVKNGDMFRVDIFKHKKTNKFYAVPIYTMDFALKVLPNKAVARSKKGEIKDWILMDENYEFCFSLYKDSLILIQTKDMQEPEFVYYNAFTSSTVSLIVSKHDNKFETLSKNQKILFKNANEKEVIAKSIGIQNLKVFEKYIVSALGEVTKAEFRQREDFKNELR

SEQ ID NO: 343 - protein, 984 aa, Campylobacter coli
MARILAFDIGISSIGWAFSENDELKDCGVRIFTKAENPKTGESLALPRRLARSARKRLARRKARLNHLKHLIANEFKLNYEDYQSFDESLAKAYKGSLISPYELRFRALNELLSKQDFARVILHIAKRRGYDDIKNSDDKEKGAILKAIKQNEEKLTNYQSVGEYLYKEYFQKFKENSKEFTNVRNKKESYERCIAQSFLKDELKLIFKKQREFGFSFSKKFEEEVLSVAFYKRALKDFSHLVGNCSFFTDEKRAPKNSPLAFMFVALTRIINLLNNLKNTEGILYTKDDLNALLNEVLKNGTLTYKQTKKLLGLSDDYEFKGEKGTYFIEFKKYKEFIKALGDHSLSQDDLNEIAKDITLIKDEIKLKKALAKYDLNQNQIDSLSKLEFKDHLNISFKALKLITPLMLEGKKYDEACNELNLKVAINEDKKDFLPAFNETYYKDEVTNPVVLRAIKEYRKVLNALLKKYGKVHKINIELAREVGKNYSQRAKIEKEQNENYKAKKDAELECEKLGLKINSKNILKLRLFKEQKEFCAYSGEKIKISDLQDEKMLEIDHIYPYSRSFDDSYMNKVLVFTKQNQEKLNQTPFEAFGNDSAKWQKIEVLAKNLPTKKQKRILDKNYKDKEQKDFKDRNLNDTRYIARLVLNYTKDYLDFLPLSDDENTKLNDTQKGSKVHVEAKSGMLTSALRHTWGFSAKDRNNHLHHAIDAVIIAYANNSIVKAFSDFKKEQESNSAELYAKKISELDYKNKRKFFEPFSGFRQKVLDKIDEIFVSKPERKKPSGALHEETFRKEEEFYQSYGGKEGVLKALELGKIRKVNGKIVKNGDMFRVDIFKHKKTNKFYAVPIYTMDFALKVLPNKAVARSKKGEIKDWILMDENYEFCFSLYKDSLILIQTKDMQEPEFVYYNAFTSSTVSLIVSKHDNKFETLSKNQKILFKNANEKEVIAKSIGIQNLKVFEKYIVSALGEVTKAEFRQREDFKK

SEQ ID NO: 344 - protein, 965 aa, Campylobacter coli
MKIIGFNLGIANIGWALRENDEIIDCGVRVFDIPENPKNGNSLALERRENKARMKIVKRKKARMLATKTFLKKELNVDLSKLFLIGSTQSIYELRTKALSSLISKEELSAIILHIAKHRGYDDSALKNENGTIIEALNKNKEAMLKFKSVGEYFYKNFVQNKEVKKIRNTTEDYSNSVPRSLLKQELDLILDKQKELGLIKNADFKAKLFEIIFFKRPLKDFSNKIGNCIFFENEKRAAKNTISACEFVALGKVVNLLKSIEKDIGIVYEKDSINEIMSIILDKTSISYKKIRDILNLPQDINFKGLDYSKNNVENSKLVDLKKLNEFKKALGDGFTNLDKDILDSIATDITLTKDTATLKEKLKNYNVLNAEQIEKLSELVFNDHINLSLKALKQIIPLMYEGKRYDEACELCNFTIAKNQEKNEYLPLFEKTRFAKDISSPVVIRAICEFRKLLNDIIRRYGSVHKIHLELTRDFGISFNDRKKIIKEIEQNEQSRIKALETIKELKLEETSKNIQIVRLFEDQKGICPYSGLKMDLKCLDELVIDYIRPYNRSLDDSYSNKVLTFKKLNDLKQGKTPFEAFGEDEKLWAEINERIKEYNGKKRFKIFDKFFKDKKPFDFTEQTLQDTRWLTKLVASYLNEYLSFLPISEDENTALGYGEKGSKQHVILSSGMITQMLRNFWYLGFKNHKDYKNNAMDAIIVAFTTNSIIFTFNNFKKELDLAKAEFYANKISESDYLLKRKFLPPFSGFKEQALEKVKNIFVSHSLKIKNKGTLHELTPLKIKELKNTYGDLDLAVKLGKIRKYNDKYYANAKGSLVRTDLFADKENKFHAVSIYKADFSTKKLPNKTPATTSNGETKEGIEMNENYNFCMSLYKNTPISVKIKGMKEPIICYYHGFNTSGSKITYKKHDNNYHNLSEDEMVVFRKNDKESIVVGKILEIKKYSISPSGELSLIENEERKWF

SEQ ID NO: 345 - protein, 965 aa, Campylobacter coli
MKIIGFNLGIANIGWALRENDEIIDCGVRVFDIPENPKNGNSLALERRENKARMKIVKRKKARMLATKTFLKKELNVDLSKLFLIGSTQSIYELRTKALSSLISKEELSAIILHIAKHRGYDDSALKNENGTIIEALNKNKEAMLKFKSVGEYFYKNFVQNKEVKKIRNTTEDYSNSVPRSLLKQELDLILDKQKELGLIKNADFKAKLFEIIFFKRPLKDFSNKIGNCIFFENEKRAAKNTISACEFVALGKVVNLLKSIEKDIGIVYEKDSINEIMSIILDKTSISYKKIRDILNLPQDINFKGLDYSKNNAENSKLVDLKKLNEFKKALGDGFANLDKDILDSIATDITLTKDTATLKEKLKNYNVLNAEQIEKLSELVFNDHINLSLKALKQIIPLMYEGKRYDEACELCNFTIAKNQEKNEYLPLFEKTRFAKDISSPVVIRAICEFRKLLNDIIRRYGSVHKIHLELTRDFGISFNDRKKIIKEIEQNEQSRIKALETIKELKLEETSKNIQIVRLFEDQKGICPYSGLKMDLKCLDELVIDYIRPYNRSLDDSYSNKVLTFKKLNDLKQGKTPFEAFGEDEKLWAEINERIKEYNGKKRFKIFDKFFKDKKPFDFTEQTLQDTRWLTKLVASYLNEYLSFLPISEDENTALGYGEKGSKQHVVLSSGMITQMLRNFWYLGFKNHKNYKNNAMDAIIVAFTTNSIIFAFNNFKKELDLAKAEFYANKISESDYLLKRKFLPPFSGFKEQALEKVKNIFVSHSLKIKNKGTLHELTPLKIKELKNTYGDLDLAVKLGKIRKYNDKYYANTKGSLVRTDLFVDKENKFHAVSIYKADFSTKKLPNKTPATTSNGETKEGIEMNENYNFCMSLYKNTPVSVKIKGMKEPIICYYHGFNTSGSKITYKKHDNNYHNLSEDEMVVFRKNDKESIVVGKILEIKKYSISPSGELSLIENEKRKWF

SEQ ID NO: 346 - protein, 965 aa, Campylobacter coli
MKIIGFNLGIANIGWALRENDEIIDCGVRVFDIPENPKNGNSLALERRENKARMKIVKRKKARMLATKTFLKKELNVDLSKLFLIGSTQSIYELRTKALSSLISKEELSAIILHIAKHRGYDDSALKNENGTIIEALNKNKEAMLKFKSVGEYFYKNFVQNKEVKKIRNTTEDYSNSVPRSLLKQELDLILDKQKELGLIKNADFKEKLFEIIFFKRPLKDFSNKIGNCIFFENEKRAAKNTISACEFVALGKVVNLLKSIEKDIGIVYEKDSINEIMSIILDKTSISYKKIRDILNLPQDINFKGLDYSKNNAENSKLVDLKKLNEFKKALGDGFANLDKDILDSIATDITLTKDTATLKEKLKNYNVLNAEQIEKLSELVFNDHINLSLKALKQIIPLMYEGKRYDEACELCNFTIAKNQEKNEYLPLFEKTRFAKDISSPVVIRAICEFRKLLNDIIRRYGSVHKIHLELTRDFGISFNDRKKIIKEIEQNEQSRIKALETIKELKLEETSKNIQIVRLFEDQKGICPYSGLKMDLKCLDELVIDYIRPYNRSLDDSYSNKILTFKKLNDLKQGKTPFEAFGEDEKLWAEINERIKEYNGKKRFKIFDKFFKDKKPFDFTEQTLQDTRWLTKLVASYLNEYLLFLPINEDENTALGYGEKGSKQHVVLSSGMITQMLRNFWYLGFKNHKDYKNNAMDAIIVAFTTNSIIFAFNNFKKELDLAKAEFYANKISESDYLLKRKFLPPFSGFKEQALEKVKNIFVSHSLKIKNKGTLHELTPLKIKELKNTYGDLDLAVKLGKIRKYNDKYYANAKGSLVRTDLFADKENKFHAVSIYKADFSTKKLPNKTPATTSNGETKEGIEMNENYNFCMSLYKNTPISVKIKGMKEPIICYYHGFNTSGSKITYKKHDNNYHNLSEDEMVVFRKNDKESIVVGKILEIKKYSISPSGELSLIENEERKWF

SEQ ID NO: 347 - protein, 933 aa, Campylobacter coli
MKIIGFNLGIANIGWALRENDEIIDCGVRVFDIPENPKNGNSLALERRENKARMKIVKRKKARMLATKTFLKKELNVDLSKLFLIGSTQSIYELRTKALSSLISKEELSVIILHIAKHRGYDDSALKNENGTIIEALNKNKETMLKFKSVGEYFYKNFVQNKEVKKIRNTTEDYSNSVPRSLLKQELDLILDRQKELGLIKNADFKAKLFEIIFFKRPLKDFSNKIGNCIFFENEKRAAKNTISACEFVALGKVVNLLKSIEKDIGIVYEKDSINEIMSIILDKTSISYKKIRDILNLPQDINFKGLDYSKNNVENSKLVDLKKLNEFKKALGDGFTNLDKDILDSIATDITLTKDTATLKEKLKNYNVLNAEQIEKLSELVFNDHINLSLKALKQIIPLMYEGKRYDEACELCNFTIAKNQEKNEYLPLFEKTRFAKDISSPVVIRAICEFRKLLNDIIRRYGSVHKIHLELTRDFGISFNDRKKIIKEIEQNEQSRIKALETIKELKLEETSKNIQIVRLFEDQKGICPYSGLKMDLKCLDELVIDYIRPYNRSLDDSYSNKVLTFKKLNDLKQGKTPFEAFGEDEKLWAEINERIKEYNGKKRFKIFDKFFKDKKPFDFTEQTLQDTRWLTKLVASYLNEHLSFLPISEDENTALGYGEKGSKQHVILSSGMITQMLRNFWYLGFKNHKDYKNNAMDAIIVAFTTNSIIFTFNNFKKELDLAKAEFYANKISESDYLLKRKFLPPFSGFKEQALEKVKNIFVSHSLKIKNKGTLHELTPLKIKELKNTYGDLDLAVKLGKIRKYNDKYYANANGSLVRSDLFIDKKNKFHAVPIYKADFSTKKLPNKTPATTSNGETKEGIEMNENYNFCMSLYKNTPISVKIKGMKESIICYYHGFNTSGSKITYKKHDNNYHNLSEDEMVVFRKNDKE

SEQ ID NO: 348 - protein, 666 aa, Campylobacter jejuni
KGEKGTYFIEFKKYKEFIKALDEHSLSQDDLNEIAKDITLIKDEIKLKKALAKYDLKENQIDSLSKLEFKDHLNISFKALKLITPLMLEGKKYDEACNELNLKVAINEDKKDFLPAFNETYYKDEVTNPVVLRAIKEYRKILNALLKKYGKVHKINIELAREVGKNHSQRAKIEKEQNENYKAKKDAELECEKLGLKINSKNILKLRLFKEQKEFCVYSGEKIKLSDLQDEKMLEIDHIYPYSRSFDDSYMNKVLVFAKQNQEKLNKTPFEAFGNDSTKWQKIEVLTKNLPTKKQKRILDKNYKDKEQKDFKDRNLNDTRYIARLVLNYTKDYLDFLPLSDDENTKLNDTQKGSKVHVEAKSGMLTSALRHTWGFSTKDRNNHLHHAIDAAIIAYANNSIVKAFSDFKKEQESNSAELYAKKISELDYKNKRKFFEPFSGFRQKVLDKIDEIFVSKPERKKPSGALHEETFRKEEEFYQSYGGKEGVLKALELGKIRKVNGKIVKNGDMFRVDIFKHKKTNKFYAVPIYTMDFALKVLPNKAVARSKKGEIKDWILMDEDYEFCFSLYKDSLILIQTKDMQEPELVYFNAFTSSTVSLIVSKHDNKFETLSKNQKILFKNANEKEVIAKSIGIQNLKVFEKYIVSALGEVTKAEFRQREDFKNELR

SEQ ID NO: 349 - protein, 190 aa, Campylobacter jejuni
MAFDIGISSIGWAFSENDELKDCGVRIFTKVENPKTGESLALPRRLARSARKRLARRKARLNHLKHLIANEFKLNYEDYQSFDESLAKAYKGSLISPYELRFRALNELLSKQDFARVILHIAKRRGYDDIKNSDDKEKGAILKAIKQNEEKLANYQSVGEYLYKEYFQKFKENSKEFTNVRNKKKVMNAA

SEQ ID NO: 350 - protein, 985 aa, Campylobacter jejuni
MAKILAFDIGISSIGWAFVENDELKDCGVRIFTKAENPKTGESLALPRRLARSARKRLARRKARLNHLKHLIANEFKLNYEDYQSFDESLAKAYKGTLISPYELRFKALNELLSKQDLARVILHIAKRRGYDNIKNSDDKEKGAILKAVKENEEKLANYKSVGEYLYKEYFQKFKENSKEFINVRNKKESYERCIAQSFLKDELKLIFQKQREFGFNFSKKFEEEVLSVAFYKRALKDFSHLVGNCSFFVDEKRAPKNSPLAFEFVALTRIVNLLNNLNKNNSYIKDDLNALLSEVLKNGTLTYKQTKKILGLSDDYEFKGQKGNYFIEFKKYKEFIKALCEHNLNQDDLNEIAKDITLVKDETKLKKALAKYDLNQNQIENLSKIEFKDHLNISFKALKLIVPLMREGKKYDEVCNELNLKTAINEDKKEFLPAFNETYYKDEVNNPVVLRAIKEYRKVLNSLLKKYGKVHKINIELAREVGKNHRERSKIEKEQNENFKAKKDAELECEKLGLKINSKNILKLRLFKEQKEFCVYSGEKIKISDLQDEKMLEIDHIYPYSRSFDDSYMNKVLVFTKQNQEKLNKTPFEAFGKDDVKWQKIETLAKNLPAKKQKRILDKNYKDKEQKDFKDRNLNDTRYIARLVLNYTKDYLEFLPLSDDENIKLNDTQKGSKVHVEAKSGMLTSVLRHTWGFSTKDRNNHLHHAIDAVIIAYANASVVKAFSDFKKEQENYTAELYAKKINELDFKNKRKFFEPFSNFRQKVLEKIDEIFVSKPERKKPSGALHEETFYKEEEFYKEYGGKEGVLKALELGKIRKVNGKIVSNANMFRVDIFKYKKTNKFYAVPIYTMDFALGILPNKAVVGGKDKQGIIKDWLLMDENYEFCFSLYKDSLILLQTKDMQEPELVYFKSFKSSTAGLVVSKHDNKFENLNENQKKLFKSANEKKVVAEGIGIQNLKVFEKYIVSALGEITKAEIKERENFKKK

SEQ ID NO: 351 - protein, 987 aa, Campylobacter jejuni
MARILAFDIGISSIGWAFSENDELKDCGVRIFTKAENPKTGESLALPRCLARSARKRLARRKARLNHLKHLIANEFKLNYEDYQSFDESLAKAYKGSLISPYELRFRALNELLSKQDFARVILHIAKRRGYDDIKNNGDEEKGEILKAIKQNEEKLVSYQSVGEYLYKEYFQKFKENSKEFINVRNKKESYERCIAQSFLKDELKLIFQKQRKFGFSFSKKFEEEVLSVAFYKRALKDFSHLVGNCSFFTDEKRAPKNSPLAFMFVALTRIINLLNNLKNTEGILYTKDDLNTLLNEVLKNGTLTYKQTKKLLGLSNDYEFKGEKGTYFIEFQKYKEFVKALGEHNLSQDDLNEIAKDITLIKDEIKLKKALAKYDLNQNQIDSLSKLEFKDHLNISFKALKLITPLMLEGKKYDEACNELNLKVAINEDKKDFLPAFNETYYKDEVTNPVVLRAIKEYRKVLNALLKKYGKVHKINIELAREVGKNHSQRAKIEKEQNENYKAKKDAELECEKLGLKINSKNILKLRLFKEQKEFCVYSGEKIKISDLQDEKMLEIDHIYPYSRSFDDSYMNKVLVFTKQNQEKLNKTPFETFGNDRVKWQKIEVLAKNLPTKKQKRILDKNYKDKEQKDFKDRNLNDTRYIARLVLNYTKDYLDFLPLSDDENTKLNDTQKGSKVHVEAKSGMLTSTLRHTWGFSTKDRNNHLHHAIDAAIIAYANNSIVKAFSDFKKEQESNTAELYAKKISELDYKNKRKFFEPFSGFRQKLLDKIDEIFVSKPERKKPSGALHEETFRKEEEFYQSYGGKEGVLKALELGKIRKVNGKIVSNGDMFRVDIFKHKKTNKFYAVPIYTMDFALKVLPNKAVVQGKDKKSGLIKDWILMDENYEFCFSLYKDSLILIQTKDMQEPELVYYERLDSSNASLTVSKHDNKFETLSKNQKILFKNANEKEVIAKSIGIQNLKVFEKYIVSALGEVTKAEFRQREDFKK

SEQ ID NO: 352 - protein, 987 aa, Campylobacter jejuni
MARILAFDIGISSIGWAFSENDELKDCGVRIFTKAENPKTGESLALPRRLARSARKRLARRKARLNHLKHLIANEFKLNYEDYQSFDEGLAKAYKGSLISPYELRFRALNELLSKQDFARVILHIAKRRGYDDIKNNGDEEKSEILKAIKQNEEKLVNYQSVGEYLYKEYFQKFKENSKEFINVRNKKESYERCIAQSFLKDELKLIFQKQREFGFSFSKKFEEEVLSVAFYKRALKDFSHLVGNCSFFTDEKRAPKNSPLAFMFVALTRIINLLNNLKNTEGILYTKDDLNTLLNEVLKNGTLTYKQTKKLLGLSDDYEFKGEKGTYFIEFKKYKEFIKALGEHNLSQDNLNEIAKDITLIKDEIKLKKALAKYDLNQNQIDSLSKLEFKDHLNISFKALKLITPLMLEGKKYDEAYNELNLKVAINEDKKDFLPAFNETYYKDEVTNPVVLRAIKEYRKVLNALLKKYGKVHKINIELAREVGKNHSQRAKIEKEQNENYKAKKDAELECEKLGLKINSKNILKLRLFKEQKEFCAYSGEKIKISDLQDEKMLEIDHIYPYSRSFDDSYMNKVLVFTKQNQEKLNQTPFEAFGNDSAKWQKIEVLAKNLPTKKQKRILDKNYKDKEQKDFKDRNLNDTRYIARLVLNYTKDYLDFLPLSDDENTKLNDTQKGSKVHVEAKSGMLTSALRHTWGFSAKDRNNHLHHAIDAVIIAYANNSIVKAFSDFKKEQESNSAELYAKKISELDYKNKRKFFEPFSGFRQKVLDKIDEIFVSKPERKKPSGALHEETFRKEEEFYQSYGGKEGVLKALELGKIRKVNGKIVKNGDMFRVDIFKHKKTNKFYAVPIYTMDFALKVLPNKAVVQGKDKKSGLIKDWILMDENYEFCFSLYKDSLILIQTKDMQEPELVYFNAFTSSTVSLIVSKHDNKFETLSKNQKILFKNANEKEVIAKSIGIQNLKVFEKYIVSALGEVTKAEFRQREDFKK

SEQ ID NO: 353 - protein, 961 aa, Campylobacter jejuni
MARILAFDIGISSIGWAFSENDELKDCGVRIFTKAENPKTGESLALPRRLARSARKRLARRKARLNHLKHLIANEFKLNYEDYQSFDESLAKAYKGSLISPYELRFRALNELLSKQDFARVILHIAKRRGYDDIKNNGDEEKGKILKAIKQNEEKLVNYQSVGEYLYKEYFQKFKENSKEFINVRNKKESYERCITQSFLKYELKLIFQKQREFGFSFSKKFEEEVLSVAFYKRALKDFSHLVGNCSFFSDEKRAPKNSPLAFMFVALTRIINLLNNLKNTEGILYTKDDLNALLNEVLKNGTLTYKQTKKLLGLSDDYEFKGEKGTYFIEFKKYKEFIKALGEHNLSQDDLNEIAKDITLIKDEIKLKKALAKYDLNQNQIDSLSKLEFKDHLNIGFKALKLITPLMLEGKKYDEACNELNLKVAINEDKKDFLPAFNETYYKDEVTNPVVLRAIKEYRKVLNALLKKYGKVHKINIELAREVGKNHSQRAKIEKEQNENYKAKKDAELECEKLGLKINSKNILKLRLFKEQKEFCAYSGEKIKLSDLQDEKMLEIDHIYPYSRSFDDSYMNKVLVFTKQNQEKLNKTPFEAFGNDNVKWQKIEVLAKNLPEKKQKRILDKNYKDKEQKDFKDRNLNDTRYIARLVLNYTKDYLDFLPLSDDENTKLKGSKVHVEAKSGMLTSALRHTWGFSTKDRNNHLHHAIDAAIIAYANNSIVKDFSDFKKEQESNSAELYAKKISELDYKNKRKFFEPFSGFRQKVLDKIDEIFVSKPERKKPSGALHEETFRKEEEFYQSYGGKEGVLKALELGKIRKVNGKIVKNGDMFRVDIFKHKKTNKFYAVPIYTMDFALKVLPNKAVARSKKGEIKDWILMDENYEFCFSLYKDSLILIQTKDMQEPELVYFNAFTSSTVSLIVSKHDNKFETLSKNLKVFEKYIVSALGEVTKAEFRQREDFKNELR

SEQ ID NO: 354 - protein, 984 aa, Campylobacter jejuni
MARILAFDIGISSIGWAFSENDELKDCGVRIFTKAENPKTGESLALPRRLARSARKRLARRKARLNHLKHLIANEFKLNYEDYQSFDESLAKAYKGSLISPYELRFRALNELLSKQDFARVILHIAKRRGYDDIKNNGDEEKGKILKAIKQNEEKLVNYQSVGEYLYKEYFQKFKENSKEFINVRNKKESYERCITQSFLKYELKLIFQKQREFGFSFSKKFEEEVLSVAFYKRALKDFSHLVGNCSFFTDEKRAPKNSPLAFMFVALTRIINILNNLKNTEGILYTKDDLNALLNEVLKNGTLTYKQTKKLLGLSDDYEFKGEKGTYFIEFKKYKEFIKALGEHNLSQDDLNEIAKDITLIKDEIKLKKALAKYDLNQNQIDSLSKLEFKDHLNISFKALKLITPLMLEGKKYDEACNELNLKVAINEDKKDFLPAFNETYYKDEVTNPVVLRAIKEYRKILNALLKKYGKVHKINIELAREVGKNHSQRAKIEKEQNENYKAKKDAEIECEKLGLKINSKNILKLRLFKEQKEFCAYSGEKIKISDLQDEKMLEIDHIYPYSRSFDDSYMNKVLVFTKQNQEKLNQTPFEAFGNDSAKWQKIEVLAKNLPTKKQKRILDKNYKDKEQKDFKDRNLNDTRYIARLVLNYTKDYLDFLPLSDDENTKLNDTQKGSKVHVEAKSGMLTSALRHTWGFSAKDRNNHLHHAIDAVIIAYANNSIVKAFSDFKKEQESNSAELYAKKISELDYKNKRKFFEPFSGFRQKVLDKIDEIFVSKPERKKPSGALHEETFRKEEEFYQSYGGKEGVLKALELGKIRKVNGKIVKNGDMFRVDIFKHKKTNKFYAVPIYTMDFALKVLPNKAVARSKKGEIKDWILMDENYEFCFSLYKDSLILIQTKDMQEPEFVYYNAFTSSTVSLIVSKHDNKFETLSKNQKILFKNANEKEVIAKSIGIQNLKVFEKYIVSALGEVTKAEFRQREDFKK

SEQ ID NO: 355 - protein, 987 aa, Campylobacter jejuni
MARILAFDIGISSIGWAFSENDELKDCGVRIFTKAENPKTGESLALPRRLARSARKRLARRKARLNHLKHLIANEFKLNYEDYQSFDESLAKAYKGSLISPYELRFRALNELLSKQDFARVILHIAKRRGYDDIKNNGDEEKGKILKAIKQNEEKLVSYQSVGEYLYKEYFQKFKENSKEFINVRNKKESYERCIAQSFLKDELKLIFQKQREFGFSFSKKFEEEVLSVAFYKRALKDFSHLVGNCSFLLMKKERQKNSPLAFMFVALTRIINLLNNLKNTEGILYTKDDLNTLLNEALKNGTLTYKQTKKLLGLSNDYEFKGEKGTYFIEFQKYKEFVKALGEHNLSQDDLNEIAKDITLIKDEIKLKKALAKYDLNQNQIDSLSKLEFKDHLNISFKALKLITPLMLEGKKYDEACNELNLKVAINEDKKDFLPAFNETYYKDEVTNPVVLRAIKEYRKVLNALLKKYGKVHKINIELAREVGKNHSQRAKIEKEQNENYKAKKDAELECEKLGLKINSKNILKLRLFKEQKEFCVYSGEKIKISDLQDEKMLEIDHIYPYSRSFDDSYMNKVLVFTKQNQEKLNKTPFETFGNDRVKWQKIEVLAKNLPTKKQKRILDKNYKDKEQKDFKDRNLNDTRYIARLVLNYTKDYLDFLPLSDDENTKLNDTQKGSKVHVEAKSGMLTSTLRHTWGFSTKDRNNHLHHAIDAAIIAYANNSIVKAFSDFKKEQESNTAELYAKKISELDYKNKRKFFEPFSGFRQKLLDKIDEIFVSKPERKKPSGALHEETFRKEEEFYQSYGGKEGVLKALELGKIRKVNGKMVKNGDMFRVDIFKHKKTNKFYAVPIYTMDFALKVLPNKAVVQGKDKKSGLIKDWILMDENYEFCFSLYKDSLILIQTKDMQEPELVYYERLDSSNASLTVSKHDNKFETLSKNQKILFKNANEKEVIAKSIGIQNLKVFEKYIVSALGEVTKAEFRQREDFKK

SEQ ID NO: 356 - protein, 987 aa, Campylobacter jejuni
MARILAFDIGISSIGWAFSENDELKDCGVRIFTKAENPKTGESLALPRRLARSARKRLARRKARLNHLKHLIANEFKLNYEDYQSFDESLAKAYKGSLISPYELRFRALNELLSKQDFARVILHIAKRRGYDDIKNNGDEEKSEILKAIKQNEEKLVNYQSVGEYLYKEYFQKFKENSKEFINVRNKKESYERCIAQSFLKDELKLIFQKQREFGFSFSKKFEEEVLSVAFYKRALKDFSHLVGNCSFFTDEKRAPKNSPLAFMFVALTRIINLLNNLKNTEGILYTKDDLNTLLNEVLKNGTLTYKQTKKLLGLSDDYEFKGEKGTYFIEFKKYKEFIKALGEHNLSQDNLNEIAKDITLIKDEIKLKKALAKYDLNQNQIDSLSKLEFKDHLNISFKALKLITPLMLEGKKYDEAYNELNLKVAINEDKKDFLPAFNETYYKDEVTNPVVLRAIKEYRKVLNALLKKYGKVHKINIELAREVGKNHSQRAKIEKEQNENYKAKKDAELECEKLGLKINSKNILKLRLFKEQKEFCAYSGEKIKISDLQDEKMLEIDHIYPYSRSFDDSYMNKVLVFTKQNQEKLNQTPFEAFGNDSAKWQKIEVLAKNLPTKKQKRILDKNYKDKEQKDFKDRNLNDTRYIARLVLNYTKDYLDFLPLSDDENTKLNDTQKGSKVHVEAKSGMLTSALRHTWGFSAKDRNNHLHHAIDAVIIAYANNSIVKAFSDFKKEQESNSAELYAKKISELDYKNKRKFFEPFSGFRQKVLDKIDEIFVSKPERKKPSGALHEETFRKEEEFYQSYGGKEGVLKALELGKIRKVNGKIVKNGDMFRVDIFKHKKTNKFYPVPIYTMDFALKVLPNKAVVQGKDKKSGLIKDWILMDENYEFCFSLYKDSLILIQTKDMQEPELVYFNAFTSSTVSLIVSKHDNKFETLSKNQKILFKNANEKEVIAKSIGIQNLKVFEKYIVSALGEVTKAEFRQREDFKK

SEQ ID NO: 357 - protein, 987 aa, Campylobacter jejuni
MARILAFDIGISSIGWAFSENDELKDCGVRIFTKAENPKTGESLALPRRLARSARKRLARRKARLNHLKHLIANEFKLNYEDYQSFDESLAKAYKGSLISPYELRFRALNELLSKQDFARVILHIAKRRGYDDIKNNGDEEKSEILKAIKQNEEKLVNYQSVGEYLYKEYFQKFKENSKEFINVRNKKESYERCIAQSFLKDELKLIFQKQREFGFSFSKKFEEEVLSVAFYKRALKDFSHLVGNCSFFTDEKRAPKNSPLAFMFVALTRIINLLNNLKNTEGILYTKDDLNTLLNEVLKNGTLTYKQTKKLLGLSDDYEFKGEKGTYFIEFKKYKEFIKALGEHNLSQDNLNEIAKDITLIKDEIKLKKALAKYDLNQNQIDSLSKLEFKDHLNISFKALKLITPLMLEGKKYDEAYNELNLKVAINEDKKDFLPAFNETYYKDEVTNPVVLRAIKEYRKVLNALLKKYGKVHKINIELAREVGKNHSQRAKIEKEQNENYKAKKDAELECEKLGLKINSKNILKLRLFKEQKEFCAYSGEKIKISDLQDEKMLEIDHIYPYSRSFDDSYMNKVLVFTKQNQEKLNQTPFEAFGNDSAKWQKIEVLAKNLPTKKQKRILDKNYKDKEQKDFKDRNLNDTRYIARLVLNYTKDYLDFLPLSDDENTKLNDTQKGSKVHVEAKSGMLTSALRHTWGFSAKDRNNHLHHAIDAVIIAYANNSIVKAFSDFKKEQESNSAELYAKKISELDYKNKRKFFEPFSGFRQKVLDKIDEIFVSKPERKKPSGALHEETFRKEEEFHQSYGGKEGVLKALELGKIRKVNGKIVKNGDMFRVDIFKHKKTNKFYAVPIYTMDFALKVLPNKAVVQGKDKKSGLIKDWILMDENYEFCFSLYKDSLILIQTKDMQEPELVYFNAFTSSTVSLIVSKHDNKFETLSKNQKILFKNANEKEVIAKSIGIQNLKVFEKYIVSALGEVTKAEFRQREDFKK

SEQ ID NO: 358 - protein, 987 aa, Campylobacter jejuni
MARILAFDIGISSIGWAFSENDELKDCGVRIFTKAENPKTGESLALPRRLARSARKRLARRKARLNHLKHLIANEFKLNYEDYQSFDESLAKAYKGSLISPYELRFRALNELLSKQDFARVILHIAKRRGYDDIKNNGDEEKSEILKAIKQNEEKLVNYQSVGEYLYKEYFQKFKENSKEFINVRNKKESYERCIAQSFLKDELKLIFQKQREFGFSFSKKFEEEVLSVAFYKRALKDFSHLVGNCSFFTDEKRAPKNSPLAFMFVALTRIINLLNNLKNTEGILYTKDDLNTLLNEVLKNGTLTYKQTKKLLGLSDDYEFKGEKGTYFIEFKKYKEFIKALGEHNLSQDNLNEIAKDITLIKDEIKLKKALAKYDLNQNQIDSLSKLEFKDHLNISFKALKLITPLMLEGKKYDEAYNELNLKVAINEDKKDFLPAFNETYYKDEVTNPVVLRAIKEYRKVLNALLKKYGKVHKINIELAREVGKNHSQRAKIEKEQNENYKAKKDAELECEKLGLKINSKNILKLRLFKEQKEFCAYSGEKIKISDLQDEKMLEIDHIYPYSRSFDDSYMNKVLVFTKQNQEKLNQTPFEAFGNDSAKWQKIEVLAKNLPTKKQKRILDKNYKDKEQKDFKDRNLNDTRYIARLVLNYTKDYLDFLPLSDDENTKLNDTQKGSKVHVEAKSGMLTSALRHTWGFSAKDRNNHLHHAIDAVIIAYANNSIVKAFSDFKKEQESNSAELYAKKISELDYKNKRKFFEPFSGFRQKVLDKIDEIFVSKPERKKPSGALHEETFRKEEEFYQSYGGKEGVLKALELGKIRKVNGKIVKNGDMFRVDIFKHKKTNKFYAVPIYTMDFALKVLPNKAVVQGKDKKSGLIKDWILMDENYEFCFSLYKDSLILIQTKDMQEPELVYFNAFTSSTVSLIVSKHDNKFETLSKNQKILFKNANEKEVIAKSIGIQNLKVFEKYIVSALGEVTKAEFRQREDFKK

SEQ ID NO: 359 - protein, 861 aa, Campylobacter jejuni
MARILAFDIGISSIGWAFSENDELKDCGVRIFTKAENPKTGESLALPRRLARSARKRLARRKARLNHLKHLIANEFKLNYEDYQSFDESLAKAYKGSLISPYELRFRALNELLSKQDFARVILHIAKRRGYDDIKNNGDEEKSEILKAIKQNEEKLVNYQSVGEYLYKEYFQKFKENSKEFINVRNKKESYERCITQSFLKDELKLIFQKQREFGFSFSKKFEEEVLSVAFYKRALKDFSHLVGNCSFFTDEKRAPKNSPLAFMFVALTRIINILNNLKNTEGILYTKDDLNALLNEVLKNGTLTYKQTKKLLGLSDDYEFKGEKGTYFIEFKKYKEFIKALGEHNLSQDDLNEIAKDITLIKDEIKLKKALAKYDLNQNQIDSLSKLEFKDHLNISFKALKLITPLMLEGKKYDEACNELNLKVAINEDKKDFLPAFNETYYKDEVTNPVVLRAIKEYRKILNALLKKYGKVHKINIELAREVGKNHSQRAKIEKEQNENYKAKKDAEIECEKLGLKINSKNILKLRLFKEQKEFCAYSGEKIKLSDLQDEKMLEIDHIYPYSRSFDDSYMNKVLVFTKQNQEKLNKTPFEAFGNDSTKWQKIEVLAKNLPEKKQKRILDKNYKDKEQKDFKDRNLNDTRYIARLVLNYTKDYLDFLPLSDDENTKLNDTQKGSKVHVEAKSGMLTSALRHTWGFSAKDRNNHLHHAIDAAIIAYANNSIVKAFSDFKKEQESNSVELYAKKISELDYKNKRKFFEPFSGFRQKVLDKIDEIFVSKPERKKPSGALHEETFRKEEEFYQSYGGKEGVLKALELGKIRKVNGKIVKNGDMFRVDIFKHKKTNKFLCCANLYYGFCFKSITK

SEQ ID NO: 360 - protein, 462 aa, Campylobacter jejuni
MARILAFDIGISSIGWAFSENDELKDCGVRIFTKAENPKTGESLALPRRLARSARKRLARRKARLNHLKHLIANEFKLNYEDYQSFDESLAKAYKGSLISPYELRFRALNELLSKQDFARVILHIAKRRGYDDIKNNGDEEKSEILKAIKQNEEKLVNYQSVGEYLYKEYFQKFKENSKEFINVRNKKESYERCITQSFLKDELKLIFQKQREFGFSFSKKFEEEVLSVAFYKRALKDFSHLVGNCSFFTDEKRAPKNSPLAFMFVALTRIINILNNLKNTEGILYTKDDLNALLNEVLKNGTLTYKQTKKLLGLSDDYEFKGEKGTYFIEFKKYKEFIKALGEHNLSQDDLNEIAKDITLIKDEIKLKKALAKYDLNQNQIDSLSKLEFKDHLNISFKALKLITPLMLEGKKYDEACNELNLKVAINEDKKDFLPAFNETYYKDEVTNPVVLRAIKEYRKS

SEQ ID NO: 361 - protein, 984 aa, Campylobacter jejuni
MARILAFDIGISSIGWAFSENDELKDCGVRIFTKAENPKTGESLALPRRLARSARKRLARRKARLNHLKHLIANEFKLNYEDYQSFDESLAKAYKGSLISPYELRFRALNELLSKQDFARVILHIAKRRGYDDIKNNGDEEKSEILKAIKQNEEKLVNYQSVGEYLYKEYFQKFKENSKEFINVRNKKESYERCITQSFLKDELKLIFQKQREFGFSFSKKFEEEVLSVAFYKRALKDFSHLVGNCSFFTDEKRAPKNSPLAFMFVALTRIINLLNNLKNTEGILYTKDDLNALLNEVLKNGTLTYKQTKKLLGLSDDYEFKGEKGTYFIEFKKYKEFIKALDEHSLSQDDLNEIAKDITLIKDEIKLKKALAKYDLNQNQIDSLSKLEFKDHLNISFKALKLITPLMLEGKKYDEACNELNLKVAINEDKKDFLPAFNETYYKDEVTNPVVLRAIKEYRKILNALLKKYGKVHKINIELAREVGKNHSQRAKIEKEQNENYKAKKDAEIECEKLGLKINSKNILKLRLFKEQKEFCAYSGEKIKISDLQDEKMLEIDHIYPYSRSFDDSYMNKVLVFTKQNQEKLNKTPFEAFGNDGVKWQKIEVLAKNLPEKKQKRILDKNYKDKEQKDFKDRNLNDTRYIARLVLNYTKDYLDFLPLSDDENTKLNDTQKGSKVHVEAKSGMLTSALRHTWGFSTKDRNNHLHHAIDAAIIAYANNSIVKAFSDFKKEQESNSAELYAKKISELDYKNKRKFFEPFSGFRQKVLDKIDEIFVSKPERKKPSGALHEETFRKEEEFYQSYGGKEGVLKALELGKIRKVNGKIVKNGDMFRVDIFKHKKTNKFYAVPIYTMDFALKVLPNKAVARSKKGEIKDWILMDENYEFCFSLYKDSLILIQTKDMQEPELVYFNAFTSSTVSLVVSKHDNKFETLSKNQKILFKNANEKEVIAKSIGIQNLKVFEKYIVSALGEVTKAEFRQREDFKK

SEQ ID NO: 362 - protein, 984 aa, Campylobacter jejuni
MARILAFDIGISSIGWAFSENDELKDCGVRIFTKAENPKTGESLALPRRLARSARKRLARRKARLNHLKHLIANEFKLNYEDYQSFDESLAKAYKGSLISPYELRFRALNELLSKQDFARVILHIAKRRGYDDIKNSDDKEKGAILKAIKQNEEKLANYQSVGEYLYKEYFQKFKENSKEFTNVRNKKESYERCIAQSFLKDELKLIFKKQREFGFSFSKKFEEEVLSVAFYKRALKDFSHLVGNCSFFTDEKRAPKNSPLAFMFVALTRIINLLNNLKNTEGILYTKDDLNALLNEVLKNGTLTYKQTKKLLGLSDDYEFKGEKGTYFIEFKKYKEFIKALGDHSLSQDDLNEIAKDITLIKDEIKLKKALAKYDLNQNQIDSLSKLEFKDHLNISFKALKLITPLMLEGKKYDEACNELNLKVAINEDKKDFLPAFNETYYKDEVTNPVVLRAIKEYRKVLNALLKKYGKVHKINIELAREVGKNYSQRAKIEKEQNENYKAKKDAELECEKLGLKINSKNILKLRLFKEQKEFCAYSGEKIKISDLQDEKMLEIDHIYPYSRSFDDSYMNKVLVFTKQNQEKLNQTPFEAFGNDSAKWQKIEVLAKNLPTKKQKRILDKNYKDKEQKDFKDRNLNDTRYIARLVLNYTKDYLDFLPLSDDENTKLNDTQKGSKVHVEAKSGMLTSALRHTWGFSAKDRNNHLHHAIDAVIIAYANNSIVKAFSDFKKEQESNSAELYAKKISELDYKNKRKFFEPFSGFRQKVLDKIDEIFVSKPERKKPSGALHEETFRKEEEFYQSYGGKEGVLKALELGKIRKVNGKIVKNGDMFRVDIFKHKKTNKFYAVPIYTMDFALKVLPNKAVARSKKGEIKDWILMDENYEFCFSLYKDSLILIQTKDMQEPEFVYYNAFTSSTVSLIVSKHDNKFETLSKNQKILFKNANEKEVIAKSIGIQNLKVFEKYIVSALGEVTKAEFRQREDFKK

SEQ ID NO: 363 - protein, 984 aa, Campylobacter jejuni
MARILAFDIGISSIGWAFSENDELKDCGVRIFTKAENPKTGESLALPRRLARSARKRLARRKARLNHLKHLIANEFKLNYEDYQSFDESLAKAYKGSLISPYELRFRALNELLSKQDFARVILHIAKRRGYDDIKNSDDKEKGAILKAIKQNEEKLANYQSVGEYLYKEYFQKFKENSKEFTNVRNKKESYERCIAQSFLKDELKLIFKKQREFGFSFSKKFEEEVLSVAFYKRALKDFSHLVGNCSFFTDEKRAPKNSPLAFMFVALTRIINLLNNLKNTEGILYTKDDLNTLLNEVLKNGTLTYKQTKKLLGLSDDYEFKGEKGTYFIEFKKYKEFIKALGEHNLSQDDLNEIAKDITLIKDEIKLKKALAKYDLNQNQIDSLSKLEFKDHLNISFKALKLITPLMLEGKKYDEACNELNLKVAINEDKKDFLPAFNETYYKDEVTNPVVLRAIKEYRKVLNALLKKYGKVHKINIELAREVGKNYSQRAKIEKEQNENYKAKKDAELECEKLGLKINSKNILKLRLFKEQKEFCAYSGEKIKISDLQDEKMLEIDHIYPYSRSFDDSYMNKVLVFTKQNQEKLNKTPFEAFGNDSTKWQKIEVLAKNLPEKKQKRILDKNYKDKEQKDFKDRNLNDTRYIARLVLNYTKDYLDFLPLSDDENTKLNDTQKGLKVHVEAKSGMLTSALRHTWGFSAKDRNNHLHHAIDAVIIAYANNSIVKAFSDFKKEQESNSAELYAKKISELDYKNKRKFFEPFSGFRQKVLDKIDEIFVSKPERKKPSGALHEETFRKEEEFYQSYGGKEGVLKALELGKIRKVNGKIVKNGDMFRVDIFKHKKTNKFYAVPIYTMDFALKVLPNKAVARSKKGEIKDWILMDENYEFCFSLYKDSLILIQTKDMQEPEFVYYNAFTSSTVSLIVSKHDNKFETLSKNQKILFKNANEKEVIAKSIGIQNLKVFEKYIVSALGEVTKAEFRQREDFKK

SEQ ID NO: 364 - protein, 984 aa, Campylobacter jejuni
MARILAFDIGISSIGWAFSENDELKDCGVRIFTKAENPKTGESLALPRRLARSARKRLARRKARLNHLKHLIANEFKLNYEDYQSFDESLAKAYKGSLISPYELRFRALNELLSKQDFARVILHIAKRRGYDDIKNSDDKEKGAILKAIKQNEEKLANYQSVGEYLYKEYFQKFKENSKEFTNVRNKKESYERCIAQSFLKDELKLIFKKQREFGFSFSKKFEEEVLSVAFYKRALKDFSHLVGNCSFFTDEKRAPKNSPLAFMFVALTRIINLLNNLKNTEGILYTKDDLNALLNEVLKNGTLTYKQTKKLLGLSDDYEFKGEKGTYFIEFKKYKEFIKALGDHSLSQDDLNEIAKDITLIKDEIKLKKALAKYDLNQNQIDSLSKLEFKDHLNISFKALKLITPLMLEGKKYDEACNELNLKVAINEDKKDFLPAFNETYYKDEVTNPVVLRAIKEYRKVLNALLKKYGKVHKINIELAREVGKNYSQRAKIEKEQNENYKAKKDAELECEKLGLKINSKNILKLRLFKEQKEFCAYSGEKIKISDLQDEKMLEIDHIYPYSRSFDDSYMNKVLVFTKQNQEKLNQTPFEAFGNDSAKWQKIEVLAKNLPTKKQKRILDKNYKDKEQKNFKDRNLNDTRYIARLVLNYTKDYLDFLPLSDDENTKLNDTQKGSKVHVEAKSGMLTSALRHTWGFSAKDRNNHLHHTIDAVIIAYANNSIVKAFSDFKKEQESNSAELYAKKISELDYKNKRKFFEPFSGFRQKVLDKIDEIFVSKPERKKPSGALHEETFRKEEEFYQSYGGKEGVLKALELGKIRKVNGKIVKNGDMFRVDIFKHKKTNKFYAVPIYTMDFALKVLPNKAVARSKKGEIKDWILMDENYEFCFSLYKDSLILIQTKDMQEPEFVYYNAFTSSTVSLIVSKHDNKFETLSKNQKILFKNANEKEVIAKSIGIQNLKVFEKYIVSALGEVTKAEFRQREDFKK

SEQ ID NO: 365 - protein, 984 aa, Campylobacter jejuni
MARILAFDIGISSIGWAFSENDELKDCGVRIFTKAENPKTGESLALPRRLARSARKRLARRKARLNHLKHLIANEFKLNYEDYQSFDESLAKAYKGSLISPYELRFRALNELLSKQDFARVILHIAKRRGYDDIKNSDDKEKGAILKAIKQNEEKLANYQSVGEYLYKEYFQKFKENSKEFTNVRNKKESYERCIAQSFLKDELKLIFKKQREFGFSFSKKFEEEVLSVAFYKRALKDFSHLVGNCSFFTDEKRAPKNSPLAFMFVALTRIINLLNNLKNTEGILYTKDDLNTFLNEVLKNGTLTYKQTKKLLGLSDDYEFKGEKGTYFIEFKKYKEFIKALGDHNLSQDDLNEIAKDITLIKDEIKLKKALAKYDLNQNQIDSLSKLEFKDHLNISFKALKLITPLMLEGKKYDEACNELNLKVAINEDKKDFLPAFNETYYKDEVTNPVVLRAIKEYRKVLNALLKKYGKVHKINIELAREVGKNHSQRAKIEKEQNENYKAKKDAELECEKLGLKINSKNILKLRLFKEQKEFCAYSGEKIKISDLQDEKMLEIDHIYPYSRSFDDSYMNKVLVFTKQNQEKLNKTPFEAFGNDSAKWQKIEVLAKNLPTKKQKRILDKNYKDKEQKDFKDRNLNDTRYIARLVLNYTKDYLDFLPLSDDENTKLNDTQKGSKVHVEAKSGMLTSALRHTWGFSTKDRNNHLHHAIDAVIIAYANNSIVKAFSDFKKEQESNSAELYAKKISELDYKNKRKFFEPFSGFRQKVLDKIDEIFVSKPERKKPSGALHEETFRKEEEFYQSYGGKEGVLKALELGKIRKVNGKIVKNGDMFRVDIFKHKKTNKFYAVPIYTMDFALKVLPNKAVARSKKGEIKDWILMDENYEFCFSLYKDSLILIQTKDMQEPEFVYYNAFTSSTVSLIVSKHDNKFETLSKNQKILFKNANEKEVIAKSIGIQNLKVFEKYIVSALGEVTKAEFRQREDFKK

SEQ ID NO: 366 - protein, 987 aa, Campylobacter jejuni
MARILAFDIGISSIGWAFSENDELKDCGVRIFTKAENPKTGESLALPRRLARSARKRLARRKARLNHLKHLIANEFKLNYEDYQSFDESLAKAYKGSLISPYELRFRALNELLSKQDFARVILHIAKRRGYDDIKNSDDKEKGAILKAIKQNEEKLANYQSVGEYLYKEYFQKFKENSKEFTNVRNKKESYERCIAQSFLKDELKLIFKKQREFGFSFSKKFEEEVLSVAFYKRALKDFSHLVGNCSFFTDEKRAPKNSPLAFMFVALTRIINLLNNLKNTEGILYTKDDLNTLLNEVLKNGTLTYKQTKKLLGLSDDYEFKGEKGTYFIEFKKYKEFIKSLGDHSLSQDDLNEIAKDITLIKDEIKLKKALAKYDLNQNQIDSLSKLEFKDHLNISFKALKLITPLMLEGKKYDEACNELNLKVAINEDKKDFLPAFNETYYKDEVTNPVVLRAIKEYRKVLNALLKKYGKVHKINIELAREVGKNHSQRAKIEKEQNENYKAKKDAELECEKLGLKINSKNILKLRLFKEQKEFCAYSGEKIKISDLQDEKMLEIDHIYPYSRSFDDSYMNKVLVFTKQNQEKLNQTPFEAFGNDSAKWQKIEVLAKNLPTKKQKRILDKNYKDKEQKNFKDRNLNDTRYIARLVLNYTKDYLDFLPLSDDENTKLNDTQKGSKVHVEAKSGMLTSALRHTWGFSAKDRNNHLHHAIDAVIIAYANNSIVKAFSDFKKEQESNSAELYAKKISELDYKNKRKFFEPFSGFRQKVLDKIDEIFVSKPERKKPSGALHEETFRKEEEFYQSYGGKEGVLKALELGKIRKVNGKIVKNGDMFRVDIFKHKKTNKFYAVPIYTMDFALKVLPNKAVARSKKGEIKDWILMDENYEFCFSLYKDSLILIQTKDMQEPEFVYYNAFTSSTVSLIVSKHDNKFETLSKNQKILFKNANEKEVIAKSIGIQNLKVFEKYIVSALGEVTKAEFRQREDFKNELR

SEQ ID NO: 367 - protein, 987 aa, Campylobacter jejuni
MARILAFDIGISSIGWAFSENDELKDCGVRIFTKAENPKTGESLALPRRLARSARKRLARRKARLNHLKHLIANEFKLNYEDYQSFDESLAKAYKGSLISPYELRFRALNELLSKQDFARVILHIAKRRGYDDIKNSDDKEKGAILKAIKQNEEKLANYQSVGEYLYKEYFQKFKENSKEFTNVRNKKESYERCIAQSFLKDELKLIFKKQREFGFSFSKKFEEEVLSVAFYKRALKDFSHLVGNCSFFTDEKRAPKNSPLAFMFVALTRIINLLNNLKNTEGILYTKDDLNALLNEVLKNGTLTYKQTKKLLGLSDDYEFKGEKGTYFIEFKKYKEFIKALGDHSLSQDDLNEIAKDITLIKDEIKLKKALVKYDLNQNQIDSLSKLEFKDHLNISFKALKLITPLMLEGKKYDEACNELNLKVAINEDKKDFLPAFNETYYKDEVTNPVVLRAIKEYRKVLNALLKKYGKVHKINIELAREVGKNYSQRAKIEKEQNENYKAKKDAELECEKLGLKINSKNILKLRLFKEQKEFCAYSGEKIKISDLQDEKMLEIDHIYPYSRSFDDSYMNKVLVFTKQNQEKLNQTPFEAFGNDSAKWQKIEVLAKNLPTKKQKRILDKNYKDKEQKDFKDRNLNDTRYIARLVLNYTKDYLDFLPLSDDENTKLNDTQKGSKVHVEAKSGMLTSALRHTWGFSAKDRNNHLHHAIDAVIIAYANNSIVKAFSDFKKEQESNSAELYAKKISELDYKNKRKFFEPFSGFRQKVLDKIDEIFVSKPERKKPSGALHEETFRKEEEFYQSYGGKEGVLKALELGKIRKVNGKIVKNGDMFRVDIFKHKKTNKFYAVPIYTMDFALKVLPNKAVARSKKGEIKDWILMDENYEFCFSLYKDSLILIQTKDMQEPELVYFNAFTSSTVSLIVSKHDNKFETLSKNQKILFKNANEKEVIAKSIGIQNLKVFEKYIVSALGEVTKAEFRQREDFKNELR

SEQ ID NO: 368 - protein, 983 aa, Campylobacter jejuni; identical to SEQ ID NO: 246

SEQ ID NO: 369 - protein, 987 aa, Campylobacter jejuni
MARILAFDIGISSIGWAFSENDELKDCGVRIFTKAENPKTGESLALPRRLARSARKRLARRKARLNHLKHLIANEFKLNYEDYQSFDESLAKAYKGSLISPYELRFRALNELLSKQDFARVILHIAKRRGYDDIKNSDDKEKGAILKAIKQNEEKLVNYQSVGEYLYKEYFQKFKENSKEFTNVRNKKESYERCIAQSFLKDELKLIFKKQREFGFSFSKKFEEEVLSVAFYKRALKDFSHLVGNCSFFTDEKRAPKNSPLAFMFVALTRIINLLNNLKNTEGILYTKDDLNALLNEVLKNGTLTYKQTKKLLGLSDDYEFKGEKGTYFIEFKKYKEFIKALGDHSLSQDDLNEIAKDITLIKDEIKLKKALAKYDLNQNQIDSLSKLEFKDHLNISFKALKLITPLMLEGKKYDEACNELNLKVAINEDKKDFLPAFNETYYKDEVTNPVVLRAIKEYRKVLNALLKKYGKVHKINIELAREVGKNYSQRAKIEKEQNENYKAKKDAELECEKLGLKINSKNILKLRLFKEQKEFCAYSGEKIKISDLQDEKMLEIDHIYPYSRSFDDSYMNKVLVFTKQNQEKLNQTPFEAFGNDSAKWQKIEVLAKNLPTKKQKRILDKNYKDKEQKDFKDRNLNDTRYIARLVLNYTKDYLDFLPLSDDENTKLNDTQKGSKVHVEAKSGMLTSALRHTWGFSAKDRNNHLHHAIDAVIIAYANNSIVKAFSDFKKEQESNSAELYAKKISELDYKNKRKFFEPFSGFRQKVLDKIDEIFVSKPERKKPSGALHEETFRKEEEFYQSYGGKEGVLKALELGKIRKVNGKIVKNGDMFRVDIFKHKKTNKFYAVPIYTMDFALKVLPNKAVARSEKGEIKDWILMDENYEFCFSLYKDSLILIQTKDMQEPELVYFNAFTSSTVSLIVSKHDNKFETLSKNQKILFKNANEKEVIAKSIGIQNLKVFEKYIVSALGEVTKAEFRQREDFKNELR

SEQ ID NO: 370 - protein, 987 aa, Campylobacter jejuni
MARILAFDIGISSIGWAFSENDELKDCGVRIFTKAENPKTGESLALPRRLARSARKRLARRKARLNHLKHLIANEFKLNYEDYQSFDESLAKAYKGSLISPYELRFRALNELLSKQDFARVILHIAKRRGYDNIKNSDNEEKSEILKAIKQNEEKLVNYQSVGEYLYKEYFQKFKENSKEFINVRNKKESYERCIAQSFLKDELKLIFQKQREFGLSFSKKFEEEVLSVAFYKRALKDFSHLVGNCSFFTDEKRAPKNSPLAFMFVALTRIINLLNNLKNTEGILYTKDDLNTLLNEVLKNGTLTYKQTKKLLGLSDDYEFKGEKGTYFIEFKKYKEFIKALGDHSLSQDDLNEIAKDITLIKDEIKLKKALAKYDLNQNQIDSLSKLEFKDHLNISFKALKLITPLMLEGKKYDEACNELNLKVVINEDKKDFLPAFNETYYKDEVTNPVVLRAIKEYRKVLNALLKKYGKVHKINIELAREVGKNHSQRAKIEKEQNENYKAKKDAELECEKLGLKINNKNILKLRLFKEQKEFCAYSGEKIKLSDLQDEKMLEIDHIYPYSRSFDDSYMNKVLVFTKQNQEKLNKTPFEAFGNDSTKWQKIEVLAKNLPTKKQKRILDKNYKDKEQKDFKDRNLNDTRYIARLVLNYTKDYLDFLPLSDDENTKLNDIQKGSKVHVEAKSGMLTSALRHTWGFSTKDRNNHLHHAIDAVIIAYANNSIVKAFSDFKKEQESNSAELYAKKISELDYKNKRKFFEPFSGFRQKVLDKIDEIFVSKPERKKPSGALHEETFRKEEEFYQSYGGKEGVLKALELGKIRKVNGKIVKNGDMFRVDIFKHKKTNKFYAVPIYTMDFALKVLPNKAVVQGKDKKSGLIKDWILMDENYEFCFSLYKDSLILIQTKDMQEPEFVYYNAFTSSTVSLIVSKHDNKFETLSKNQKILFKNANEKEVIAKSIGIQNLKVFEKYIVSALGEVTKAEFRQREDFKK

SEQ ID NO: 371 - protein, 984 aa, Campylobacter jejuni
MARILAFDIGISSIGWAFSENDELKDCGVRIFTKAENPKTGESLALPRRLARSARKRLARRKARLNHLKHLIANEFKLNYEDYQSFDESLAKAYKGSLISPYELRFRALNELLSKQDFARVILHIVKRRGYDDIKNSDDKEKGAILKAIKQNEEKLANYQSVGEYLYKEYFQKFKENSKEFTNVRNKKESYERCIAQSFLKDELKLIFKKQREFGFSFSKKFEEEVLSVAFYKRALKDFSHLVGNCSFFTDEKRAPKNSPLAFMFVALTRIINLLNNLKNTEGILYTKDDLNTLLNEVLKNGTLTYKQTKKLLGLSDDYEFKGEKGTYFIEFKKYKEFIKALGDHSLSQDDLNEIAKDITLIKDEIKLKKALAKYDLNQNQIDSLSKLEFKDHLNISFKALKLITPLMLEGKKYDEACNELNLKVAINEDKKDFLPAFNETYYKDEVTNPVVLRAIKEYRKVLNALLKKYGKVHKINIELAREVGKNHSQRAKIEKEQNENYKAKKDAEFECEKLGLKINSKNILKLRLFKEQKEFCAYSGEKIKISDLQDEKMLEIDHIYPYSRSFDDSYMNKVLVFTKQNQEKLNKTPFEAFGNDSAKWQKIEVLAKNLPTKKQKRILDKNYKDKEQKDFKDRNLNDTRYIARLVLNYTKDYLDFLPLSDDENTKLNDTQKGSKVHVEAKSGMLTSALRHTWGFSTKDRNNHLHHAIDAVIIAYANNSIVKAFSDFKKEQESNSAELYAKKISELDYKNKRKFFEPFSGFRQKVLDKIDEIFVSKPERKKPSGALHEETFRKEEEFYQSYGGKEGVLKALELGKIRKVNGKIVKNGDMFRVDIFKHKKTNKFYAVPIYTMDFALKVLPNKAVARSKKGEIKDWILMDENYEFCFSLYKDSLILIQTKDMQEPEFVYYNAFTSSTVSLIVSKHDNKFETLSKNQKILFKNANEKEVIAKSIGIQNLKVFEKYIVSALGEVTKAEFRQREDFKK

SEQ ID NO: 372 - protein, 984 aa, Campylobacter jejuni
MARILAFDIGISSIGWAFSENDELKDCGVRIFTKAENPKTGESLALPRRLARSARKRLARRKARLNHLKHLIANEFKLNYEDYQSFDESLAKAYKGSLISPYELRFRALNELLSKQDFARVILHIVKRRGYDDIKNSDDKEKGTILKAIKQNEEKLANYQSVGEYLYKEYFQKFKENSKEFTNVRNKKESYERCIAQSFLKDELKLIFKKQREFGFSFSKKFEEEVLSVAFYKRALKDFSHLVGNCSFFTDEKRAPKNSPLAFMFVALTRIINLLNNLKNTEGILYTKDDLNTLLNEVLKNGTLTYKQTKKLLGLSDDYEFKGEKGTYFIEFKKYKEFIKALGEHNLSQDDLNEIAKDITLIKDEIKLKKALAKYDLNQNQIDSLSKLEFKDHLNISFKALKLITPLMLEGKKYDEACNELNLKVAINEDKKDFLPAFNETYYKDEVTNPVVLRAIKEYRKVLNALLKKYGKVHKINIELAREVGKNYSQRAKIEKEQNENYKAKKDAELECEKLGLKINSKNILKLRLFKEQKEFCAYSGEKIKISDLQDEKMLEIDHIYPYSRSFDDSYMNKVLVFTKQNQEKLNQTPFEAFGNDSAKWQKIEVLAKNLPTKKQKRILDKNYKDKEQKDFKDRNLNDTRYIARLVLNYTKDYLDFLPLSDDENTKLNDTQKGSKVHVEAKSGMLTSALRHTWGFSAKDRNNHLHHAIDAVIIAYANNSIVKAFSDFKKEQESNSAELYAKKISELDYKNKRKFFEPFSGFRQKVLDKIDEIFVSKPERKKPSGALHEETFRKEEEFYQSYGGKEGVLKALELGKIRKVNGKIVKNGDMFRVDIFKHKKTNKFYAVPIYTMDFALKVLPNKAVARSKKGEIKDWILMDENYEFCFSLYKDSLILIQTKDMQEPEFVYYNAFTSSTVSLIVSKHDNKFETLSKNQKILFKNANEKEVIAKSIGIQNLKVFEKYIVSALGEVTKAEFRQREDFKK

SEQ ID NO: 373 - protein, 987 aa, Campylobacter jejuni
MARILAFDIGISSIGWAFSENDELKDCGVRIFTKAENPKTGESLALPRRLARSARKRLARRKARLNHLKHLIANEFKLNYEDYQSFNESLAKAYKGSLISPYELRFRALNELLSKQDFARVILHIAKRRGYDDIKNSDDKEKGAILKVIKQNEEKLANYQSVGEYLYKEYFQKFKENSKEFTNVRNKKESYERCIAQSFLKDELKLIFQKQREFGFSFSKKFEEEVLSVAFYKRALKDFSHLVGNCSFFTDEKRAPKNSPLAFMFVALTRIINLLNNLKNTEGILYTKDDLNALLNEVLKNGTLTYKQTKKLLGLSDDYEFKGEKGTYFIEFKKYKEFIKALGDHSLSQDDLNEIAKDITLIKDEIKLKKALAKYDLNQNQIDSLSKLEFKDHLNISFKALKLITPLMLEGKKYDEACNELNLKVAINEDKKDFLPAFNETYYKDEVTNPVVLRAIKEYRKVLNALLKKYGKVHKINIELAREVGKNYSQRAKIEKEQNENYKAKKDAELECEKLGLKINSKNILKLRLFKEQKEFCAYSGEKIKISDLQDEKMLEIDHIYPYSRSFDDSYMNKVLVFTKQNQEKLNQTPFEAFGNDSAKWQKIEVLAKNLPTKKQKRILDKNYKDKEQKDFKDRNLNDTRYIARLVLNYTKDYLDFLPLSDDENTKLNDTQKGSKVHVEAKSGMLTSALRHTWGFSAKDRNNHLHHAIDAVIIAYANNSIVKAFSDFKKEQESNSAELYAKKISELDYKNKRKFFEPFSGFRQKVLDKIDEIFVSKPERKKPSGALHEETFRKEEEFYQSYGGKEGVLKALELGKIRKVNGKIVKNGDMFRVDIFKHKKTNKFYAVPIYTMDFALKVLPNKAVARSKKGEIKDWILMDENYEFCFSLYKDSLILIQTKDMQEPELVYFNAFTSSTVSLIVSKHDNKFETLSKNQKILFKNANEKEVIAKSIGIQNLKVFEKYIVSALGEVTKAEFRQREDFKNELR

SEQ ID NO: 374 - protein, 984 aa, Campylobacter jejuni
MARILAFDIGISSIGWAFSENDELKDCGVRIFTKAENPKTGESLALPRRLARSARKRLARRKARLNRLKHLIANEFKLNYEDYQSFDESLAKAYKGSLISPYELRFRALNELLSKQDFARVILHIAKRRGYDDIKNSDDKEKGAILKAIKQNEEKLANYQSVGEYLYKEYFQKFKENSKEFTNVRNKKESYERCIAQSFLKDELKLIFKKQREFGFSFSKKFEEEVLSVAFYKRALKDFSHLVGNCSFFTDEKRAPKNSPLAFMFVALTRIINLLNNLKNTEGILYTKDDLNALLNEVLKNGTLTYKQTKKLLGLSDDYEFKGEKGTYFIEFKKYKEFIKALGDHSLNQDDLNEIAKDITLIKDEIKLKKALAKYDLNQNQIDSLSKLEFKDHLNISFKALKLITPLMLEGKKYDEACNELNLKVAINEDKKDFLPAFNETYYKDEVTNPVVLRAIKEYRKVLNALLKKYGKVHKINIELAREVGKNYSQRAKIEKEQNENYKAKKDAELECEKLGLKINSKNILKLRLFKEQKEFCVYSGEKIKISDLQDEKMLEIDHIYPYSRSFDDSYMNKVLVFTKQNQEKLNQTPFEAFGNDSAKWQKIEVLAKNLPTKKQKRILDKNYKDKEQKDFKDRNLNDTRYIARLVLNYTKDYLDFLPLSDDENTKLNDTQKGSKVYVEAKSGMLTSALRHTWGFSTKDRNNHLHHAIDAVIIAYANNSIVKAFSDFKKEQESNSAELYAKKISELDYKNKRKFFEPFSGFRQKVLDKIDEIFVSKPERKKPSGALHEETFRKEEEFYQSYGGKEGVLKALELGKIRKVNGKIVKNGDMFRVDIFKHKKTNKFYAVPIYTMDFALKVLPNKAVARSKKGEIKDWILMDENYEFCFSLYKDSLILIQTKDMQEPEFVYYNAFTSSTVSLIVSKHDNKFETLSKNQKILFKNANEKEVIAKSIGIQNLKVFEKYIVSALGEVTKAEFRQREDFKK

SEQ ID NO: 375 - protein, 984 aa, Campylobacter jejuni
MARILAFDIGISSIGWAFSENDELKDCGVRIFTKVENPKTGESLALPRRLARSARKRLARRKARLNHLKHLIANEFKLNYEDYQSFDESLAKAYKGSLISPYELRFRALNELLSKQDFARVILHIAKRRGYDDIKNSDDKEKGAILKAIKQNEEKLANYQSVGEYLYKEYFQKFKENSKEFTNVRNKKESYERCIAQSFLKDELKLIFKKQREFGFSFLKKFEEEVLSVAFYKRALKDFSHLVGNCSFFTDEKRAPKNSPLAFMFVALTRIINLLNNLKNTEGILYTKDDLNALLNEVLKNGTLTYKQTKKLLGLSDDYEFKGEKGTYFIEFKKYKEFIKALGEHNLSQDDLNEIAKDITLIKDEIKLKKALAKYDLNQNQIDSLSKLEFKDHLNISFKALKLITPLMLEGKKYDEAYNELNLKVAINEDKKDFLPAFNETYYKDEVTNPVVLRAIKEYRKVLNALLKKYGKVHKINIELAREVGKNHSQRAKIEKEQNENYKAKKDAELECEKLGLKINSKNILKLRLFKEQKEFCAYSGEKIKISDLQDEKMLEIDHIYPYSRSFDDSYMNKVLVFTKQNQEKLNQTPFEAFGNDSAKWQKIEVLAKNLPTKKQKRILDKNYKDKEQKDFKDRNLNDTRYIARLVLNYTKDYLDFLPLSDDENTKLNDTQKGSKVHVEAKSGMLTSALRHTWGFSAKDRNNHLHHAIDAVIIAYANNSIVKAFSDFKKEQESNSAELYAKKISELDYKNKRKFFEPFSGFRQKVLDKIDEIFVSKPERKKPSGALHEETFRKEEEFYQSYGGKEGVLKALELGKIRKVNGKIVKNGDMFRVDIFKHKKTNKFYAVPIYTMDFALKVLPNKAVARSKKGEIKDWILMDENYEFCFSLYKDSLILIQTKDMQEPELVYFNAFTSSTVSLIVSKHDNKFETLSKNQKILFKNANEKEVIAKSIGIQNLKVFEKYIVSALGEVTKAEFRQREDFKK

SEQ ID NO: 376 - protein, 984 aa, Campylobacter jejuni
MARILAFDIGISSIGWAFSENDELKDCGVRIFTKVENPKTGESLALPRRLARSARKRLARRKARLNHLKHLIANEFKLNYEDYQSFDESLAKAYKGSLISPYELRFRALNELLSKQDFARVILHIAKRRGYDDIKNSDDKEKGAILKAIKQNEEKLANYQSVGEYLYKEYFQKFKENSKEFTNVRNKKESYERCIAQSFLKDELKLIFKKQREFGFSFSKKFEEEVLSVAFYKRALKDFSHLVGNCSFFTDEKRAPKNSPLAFMFVALTRIINLLNNLKNTEGILYTKDDLNALLNEVLKNGTLTYKQTKKLLGLSDDYEFKGEKGTYFIEFKKYKEFIKALGEHNLSQDDLNEIAKDITLIKDEIKLKKALAKYDLNQNQIDSLSKLEFKDHLNISFKALKLITPLMLEGKKYDEACNELNLKVAINEDKKDFLPAFNETYYKDEVTNPVVLRAIKEYRKVLNALLKKYGKVHKINIELAREVGKNHSQRAKIEKEQNENYKAKKDAELECEKLGLKINSKNILKLRLFKEQKEFCAYSGEKIKISDLQDEKMLEIDHIYPYSRSFDDSYMNKVLVFTKQNQEKLNKTPFEAFGNDSAKWQKIEVLAKNLPTKKQKRILDKNYKDKEQKDFKDRNLNDTRYIARLVLNYTKDYLDFLPLSNDENTKLNDTQKGSKVHVEAKSGMLTSALRHTWGFSTKDRNNHLHHAIDAVIIAYANNSIVKAFSDFKKEQESNSAELYAKKISELDYKNKRKFFEPFSGFRQKVLDKIDEIFVSKPERKKPSGALHEETFRKEEEFYQSYGGKEGVLKALELGKIRKVNGKIVKNGDMFRVDIFKHKKTNKFYAVPIYTMDFALKVLPNKAVARSKKGEIKDWILMDENYEFCFSLYKDSLILIQTKDMQEPEFVYYNAFTSSTVSLIVSKHDNKFETLSKNQKILFKNANEKEVIAKSIGIQNLKVFEKYIVSALGEVTKAEFRQREDFKK

SEQ ID NO: 377 - protein, 984 aa, Campylobacter jejuni
MARILAFDIGISSIGWAFSENDELKDCGVRIFTKVENPKTGESLALPRRLARSARKRLARRKARLNHLKHLIANEFKLNYEDYQSFDESLAKAYKGSLISPYELRFRALNELLSKQDFARVILHIAKRRGYDDIKNSDDKEKGAILKAIKQNEEKLANYQSVGEYLYKEYFQKFKENSKEFTNVRNKKESYERCIAQSFLKDELKLIFKKQREFGFSFSKKFEEEVLSVAFYKRALKDFSHLVGNCSFFTDEKRAPKNSPLAFMFVALTRIINLLNNLKNTEGILYTKDDLNALLNEVLKNGTLTYKQTKKLLGLSDDYEFKGEKGTYFIEFKKYKEFIKALGEHNLSQDDLNEIAKDITLIKDEIKLKKALAKYDLNQNQIDSLSKLEFKDHLNISFKALKLITPLMLEGKKYDEACNELNLKVAINEDKKDFLPAFNETYYKDEVTNPVVLRAIKEYRKVLNALLKKYGKVHKINIELAREVGKNHSQRAKIEKEQNENYKAKKDAELECEKLGLKINSKNILKLRLFKEQKEFCAYSGEKIKISDLQDEKMLEIDHIYPYSRSFDDSYMNKVLVFTKQNQEKLNKTPFEAFGNDSAKWQKIEVLAKNLPTKKQKRILDKNYKDKEQKDFKDRNLNDTRYIARLVLNYTKDYLDFLPLSDDENTKLNDTQKGSKVHVEAKSGMLTSALRHTWGFSTKDRNNHLHHAIDAVIIAYANNSIVKAFSDFKKEQESNSAELYAKKISELDYKNKRKFFEPFSGFRQKVLDKIDEIFVSKPERKKPSGALHEETFRKEEEFYQSYGGKEGVLKALELGKIRKVNGKIVKNGDMFRVDIFKHKKTNKFYAVPIYTMDFALKVLPNKAVARSKKGEIKDWILMDENYEFCFSLYKDSLILIQTKDMQEPEFVYYNAFTSSTVSLIVSKHDNKFETLSKNQKILFKNANEKEVIAKSIGIQNLKVFEKYIVSALGEVTKAEFRQREDFKK

SEQ ID NO: 378 - protein, 984 aa, Campylobacter jejuni
MARILAFDIGISSIGWAFSENDELKDCGVRIFTKVENPKTGESLALPRRLARSARKRLARRKARLNHLKHLIANEFKLNYEDYQSFDESLAKAYKGSLISPYELRFRALNELLSKQDFARVILHIAKRRGYDDIKNSDDKEKGAILKAIKQNEEKLANYQSVGEYLYKEYFQKFKENSKEFTNVRNKKESYERCIAQSFLKDELKLIFKKQREFGFSFSKKFEEEVLSVAFYKRALKDFSHLVGNCSFFTDEKRAPKNSPLAFMFVTLTRIINLLNNLKNTEGILYTKDDLNALLNEVLKNGTLTYKQTKKLLGLSDDYEFKGEKGTYFIEFKKYKEFIKALGEHNLSQDDLNEIAKDITLIKDEIKLKKALAKYDLNQNQIDSLSKLEFKDHLNISFKALKLITPLMLEGKKYDEACNELNLKVAINEDKKDFLPAFNETYYKDEVTNPVVLRAIKEYRKVLNALLKKYGKVHKINIELAREVGKNHSQRAKIEKEQNENYKAKKDAELECEKLGLKINSKNILKLRLFKEQKEFCAYSGEKIKISDLQDEKMLEIDHIYPYSRSFDDSYMNKVLVFTKQNQEKLNKTPFEAFGNDSAKWQKIEVLAKNLPTKKQKRILDKNYKDKEQKDFKDRNLNDTRYIARLVLNYTKDYLDFLPLSDDENTKLNDTQKGSKVHVEAKSGMLTSALRHTWGFSTKDRNNHLHHAIDAVIIAYANNSIVKAFSDFKKEQESNSAELYAKKISELDYKNKRKFFEPFSGFRQKVLDKIDEIFVSKPERKKPSGALHEETFRKEEEFYQSYGGKEGVLKALELGKIRKVNGKIVKNGDMFRVDIFKHKKTNKFYAVPIYTMDFALKVLPNKAVARSKKGEIKDWILMDENYEFCFSLYKDSLILIQTKDMQEPEFVYYNAFTSSTVSLIVSKHDNKFETLSKNQKILFKNANEKEVIAKSIGIQNLKVFEKYIVSALGEVTKAEFRQREDFKK

SEQ ID NO: 379 - protein, 984 aa, Campylobacter jejuni
MARILAFDIGISSIGWAFSENDELKDCGVRIFTKVENPKTGESLALPRRLARSARKRLARRKARLNHLKHLIANEFKLNYEDYQSFDESLAKAYKGSLISPYELRFRALNELLSKQDFARVILHIAKRRGYDDIKNSDDKEKGAILKAIKQNEEKLANYQSVGEYLYKEYFQKFKENSKEFTNVRNKKESYERCIAQSFLKDELKLIFKKQREFGFSFSKKFEEEVLSVAFYKRALKDFSHLVGNCSFFTDEKRAPKNSPLAFMFVALTRIINLLNNLKNTEGILYTKDDLNALLNEVLKNGTLTYKQTKKLLGLSDDYEFKGEKGTYFIEFKKYKEFIKALGEHNLSQDDLNEIAKDITLIKDEIKLKKALAKYDLNQNQIDSLSKLEFKDHLNISFKALKLITPLMLEGKKYDEACNELNLKVAINEDKKDFLPAFNETYYKDEVTNPVVLRAIKEYRKVLNALLKKYGKVHKINIELAREVGKNHSQRAKIEKEQNENYKAKKDAELECEKLGLKINSKNILKLRLFKEQKEFCAYSGEKIKISDLQDEKMLEIDHIYPYSRSFDDSYMNKVLVFTKQNQEKLNKTPFEAFGNDSAKWQKIEVLAKNLPTKKQKRILDKNYKDKEQKDFKDRNLNDTRYIARLVLNYTKDYLDFLPLSDDENTKLNDTQKGSKVHVEAKSGMLTSALRHTWGFSTKDRNNHLHHAIDAVIIAYANNSIVKAFSDFKKEQESNSAELYAKKISELDYKNKRKFFEPFSGFRQKVLDKIDEIFVSKPERKKPSGALHEETFRKEEEFYQSYGGKEGVLKALELGKIRKVNGKIVKNGDMFRVDIFKHKKTNKFYAVPIYTMDFALKVLPNKAVARSKKGEIKDWILMDENYEFCFSLYKDSLILIQTKDMQEPEFVYYNAFTSSTVSLIVSKHDNKFETLSKNQKILFKNANEKEVIAKSIGIQNLKVFEKYIVSALGEVTKAEFIQREDFKK

SEQ ID NO: 380 - protein, 987 aa, Campylobacter jejuni
MARILAFDIGISSIGWAFSENDELKDCGVRIFTKVENPKTGESLALPRRLARSARKRLARRKARLNHLKHLIANEFKLNYEDYQSFDESLAKAYKGSLISPYELRFRALNELLSKQDFARVILHIAKRRGYDDIKNSDDKEKGAILKAIKQNEEKLANYQSVGEYLYKEYFQKFKENSKEFTNVRNKKESYERCIAQSFLKDELKLIFKKQREFGFSFSKKFEEEVLSVAFYKRALKDFSHLVGNCSFFTDEKRVPKNSPLAFMFVALTRIINLLNNLKNTEGILYTKDDLNALLNEVLKNGTLTYKQTKKLLGLSDDYEFKGEKGTYFIEFKKYKEFIKALGEHNLSQDDLNEIAKDITLIKDEIKLKKALAKYDLNQNQIDSLSKLEFKDHLNISFKALKLITPLMLEGKKYDEACNELNLKVAINEDKKDFLPAFNETYYKDEVTNPVVLRAIKEYRKVLNALLKKYGKVHKINIELAREVGKNHSQRAKIEKEQNENYKAKKDAELECEKLGLKINSKNILKLRLFKEQKEFCAYSGEKIKISDLQDEKMLEIDHIYPYSRSFDDSYMNKVLVFTKQNQEKLNQTPFEAFGNDSAKWQKIEVLAKNLPTKKQKRILDKNYKDKEQKNFKDRNLNDTRYIARLVLNYTKDYLDFLPLSDDENTKLNDTQKGSKVHVEAKSGMLTSALRHTWGFSAKDRNNHLHHAIDAVIIAYANNSIVKAFSDFKKEQESNSAELYAKKISELDYKNKRKFFEPFSGFRQKVLDKIDEIFVSKPERKKPSGALHEETFRKEEEFYQSYGGKEGVLKALELGKIRKVNGKIVKNGDMFRVDIFKHKKTNKFYGVPIYTMDFALKVLPNKAVARSKKGEIKDWILMDENYEFCFSLYKDSLILIQTKDMQEPEFVYYNAFTSSTVSLIVSKHDNKFETLSKNQKILFKNANEKEVIAKSIGIQNLKVFEKYIVSALGEVTKAEFRQREDFKNELR

SEQ ID NO: 381 - protein, 984 aa, Campylobacter jejuni
MARILAFDIGISSIGWAFSENDELKDCGVRIFTKVENPKTGESLALPRRLARSARKRLARRKVRLNHLKHLIANEFKLNYEDYQSFDESLAKAYKGSLISPYELRFRALNELLSKQDFARVILHIAKRRGYDDIKNSDDKEKGAILKAIKQNEEKLANYQSVGEYLYKEYFQKFKENSKEFTNVRNKKESYERCIAQSFLKDELKLIFKKQREFGFSFSKKFEEEVLSVAFYKRALKDFSHLVGNCSFFTDEKRAPKNSPLAFMFVALTRIINLLNNLKNTEGILYTKDDLNALLNEVLKNGTLTYKQTKKLLGLSDDYEFKGEKGTYFIEFKKYKEFIKALGEHNLSQDDLNEIAKDITLIKDEIKLKKALAKYDLNQNQIDSLSKLEFKDHLNISFKALKLITPLMLEGKKYDEACNELNLKVAINEDKKDFLPAFNETYYKDEVTNPVVLRAIKEYRKVLNALLKKYGKVHKINIELAREVGKNHSQRAKIEKEQNENYKAKKDAELECEKLGLKINSKNILKLRLFKEQKEFCAYSGEKIKISDLQDEKMLEIDHIYPYSRSFDDSYMNKVLVFTKQNQEKLNKTPFEAFGNDSAKWQKIEVLAKNLPTKKQKRILDKNYKDKEQKDFKDRNLNDTRYIARLVLNYTKDYLDFLPLSDDENTKLNDTQKGSKVHVEAKSGMLTSALRHTWGFSTKDRNNHLHHAIDAVIIAYANNSIVKAFSDFKKEQESNSAELYAKKISELDYKNKRKFFEPFSGFRQKVLDKIDEIFVSKPERKKPSGALHEETFRKEEEFYQSYGGKEGVLKALELGKIRKVNGKIVKNGDMFRVDIFKHKKTNKFYAVPIYTMDFALKVLPNKAVARSKKGEIKDWILMDENYEFCFSLYKDSLILIQTKDMQEPEFVYYNAFTSSTVSLIVSKHDNKFETLSKNQKILFKNANEKEVIAKSIGIQNLKVFEKYIVSALGEVTKAEFRQREDFKK

SEQ ID NO: 382 - protein, 721 aa, Campylobacter jejuni
MFVALTRIINLLNNLKNTEGILYTKDDLNTLLNEVLKNGTLTYKQTKKLLGLSDDYEFKGEKGTYFIEFKKYKEFIKALGDHSLSQDDLNEIAKDITLIKDEIKLKKALAKYDLNQNQIDSLSKLEFKDHLNISFKALKLITPLMLEGKKYDEACNELNLKVAINEDKKDFLPAFNETYYKDEVTNPVVLRAIKEYRKVLNALLKKYGKVHKINIELAREVGKNYSQRAKIEKEQNENYKAKKDAELECEKLGLKINSKNILKLRLFKEQKEFCAYSGEKIKISDLQDEKMLEIDHIYPYSRSFDDSYMNKVLVFTKQNQEKLNQTPFEAFGNDSAKWQKIEVLAKNLPTKKQKRILDKNYKDKEQKDFKDRNLNDTRYIARLVLNYTKDYLDFLPLSDDENTKLNNTQKGSKVYVEAKSGMLTSALRHTWGFSTKDRNNHLHHAIDAVIIAYANNSIVKAFSDFKKEQESNSAELYAKKISELDYKNKRKFFEPFSGFRQKVLDKIDEIFVSKPERKKPSGALHEETFRKEEEFYQSYGGKEGVLKALELGKIRKVNGKIVKNGDMFRVDIFKHKKTNKFYAVPIYTMDFALKVLPNKAVARSKKGEIKDWILMDENYEFCFSLYKDSLILIQTKDMQEPEFVYYNAFTSSTVSLIVSKHDNKFETLSKNQKILFKNANEKEVIAKSIGIQNLKVFEKYIVSALGEVTKAEFRQREDFKK

SEQ ID NO: 383 - protein, 512 aa, Campylobacter jejuni
MHKINIELAREVGKNHSQRAKIEKEQNENYKAKKDAEIECEKLGLKINSKNILKLRLFKEQKEFCAYSGEKIKLSDLQDEKMLEIDHIYPYSRSFDDSYMNKVLVFTKQNQEKLNKTPFEAFGNDSTKWQKIEVLAKNLPEKKQKRILDKNYKDKEQKDFKDRNLNDTRYIARLVLNYTKDYLDFLPLSDDENTKLNDTQKGSKVHVEAKSGMLTSALRHTWGFSAKDRNNHLHHAIDAAIIAYANNSIVKAFSDFKKEQESNSVELYAKKISELDYKNKRKFFEPFSGFRQKVLDKIDEIFVSKPERKKPSGALHEETFRKEEEFYQSYGGKEGVLKALELGKIRKVNGKIVKNGDMFRVDIFKHKKTNKFYAVPIYTMDFALKVLPNKAVARSKKGEIKDWILMDENYEFCFSLYKDSLILIQTKDMQEPELVYFNAFTSSTVSLIVSKHDNKFETLSKNQKILFKNANEKEVIAKSIGIQNLKVFEKYIVSALGEVTKAEFRQREDFKK

SEQ ID NO: 384 - protein, 965 aa, Campylobacter jejuni
MKIIGFNLGIANIGWALRENDEIIDCGVRVFDIPENPKNGNSLALERRENKARMKIVKRKKARMLATKTFLKKELNVDLSKLFLIGSTQSIYELRAKALSSLISKEELSAIILHIAKHRGYDDSALKNENGTIIEALNKNKETMLKFKSVGEYFYKNFVQNKEVKKIRNTTEDYSNSVPRSLLKQELDLILDKQKELGLIKNADFKEKLFEIIFFKRPLKDFSNKIGNCIFFENEKRAAKNTISACEFVALGKVVNLLKSIEKDIGIVYEKDSINEIMSIILDKTSISYKKIRDILNLPQEINFKGLDYSKNNVENSKLVDLKKLNEFKKALGDGFANLDKDILDSIATDITLTKDTATLKEKLKNYNVLNAEQIEKLSELVFNDHINLSLKALKQIIPLMYEGKRYDEACELCNFTIAKNQEKSEYLPLFEKTRFAKDISSPVVIRAICEFRKLLNDIIRRYGSVHKIHLELTRDFGISFSDRKKIIKEIEQNEQSRIKALETIKELKLEETSKNIQIVRLFEDQKGICPYSGLKMDLNRLDELVIDYIRPYNRSLDDSYSNKVLTFKKLSDLKQGKTPFEAFGEDEKLWAEINERIKEYNGKKRFKIFDKFFKDKKPFDFTEQTLQDTRWLTKLVASYLNEYLSFLPISEDENTALGYGEKGSKQHVILSSGMITQMLRNFWYLGFKNHKDYKNNAMDAIIVAFTTNSIIFAFNNFKKELDLAKAEFYANKISESDYLLKRKFLPPFSGFKEQALEKVKNIFVSHSLKIKNKGTLHDLTPLKIKELKNTYGDLDLAVKLGKIRKYNDKYYANANGSLVRADLFVDKKNKFHAVSIYKADFSTKKLPNKTPATTSNGETKEGIEMNENYNFCMSLYKNTPISVKIKGMKEPIICYYHGFNTSGSKITYKKHDNNYHNLSEDEMVVFRKNDKESIAVGKILEIKKYSISPSGELSLIENEERKWF

SEQ ID NO: 385 - protein, 759 aa, Campylobacter jejuni
MLSVAFYKRALKDFSHLVGNCSFFTDEKRAPKNSPLAFMFVALTRIINLLNNLKNTEGILYTKDDLNALLNEVLKNGTLTYKQTKKLLGLSDDYEFKGEKGTYFIEFKKYKEFIKALGEHNLSQDDLNEIAKDITLIKDEIKLKKALAKYDLNQNQIDSLSKLEFKDHLNISFKALKLITPLMLEGKKYDEACNELNLKVAINEDKKDFLPAFNETYYKDEVTNPVVLRAIKEYRKVLNALLKKYGKVHKINIELAREVGKNHSQRAKIEKEQNENYKAKKDAELECEKLGLKINSKNILKLRLFKEQKEFCAYSGEKIKISDLQDEKMLEIDHIYPYSRSFDDSYMNKVLVFTKQNQEKLNKTPFEAFGNDSAKWQKIEVLAKNLPTKKQKRILDKNYKDKEQKDFKDRNLNDTRYIARLVLNYTKDYLDFLPLSDDENTKLNDTQKGSKVHVEAKSGMLTSALRHTWGFSTKDRNNHLHHAIDAVIIAYANNSIVKAFSDFKKEQESNSAELYAKKISELDYKNKRKFFESFSGFRQKVLDKIDEIFVSKPERKKPSGALHEETFRKEEEFYQSYGGKEGVLKALELGKIRKVNGKIVKNGDMFRVDIFKHKKTNKFYAVPIYTMDFALKVLPNKAVARSKKGEIKDWILMDENYEFCFSLYKDSLILIQTKDMQEPEFVYYNAFTSSTVSLIVSKHDNKFETLSKNQKILFKNANEKEVIAKSIGIQNLKVFEKYIVSALGEVTKAEFRQREDFKK

SEQ ID NO: 386 - protein, 984 aa, Campylobacter jejuni
MVRILAFDIGISSIGWAFSENDELKDCGVRIFTKVENPKTGESLALPRRLARSARKRLARRKARLNHLKHLIANEFKLNYEDYQSFDESLAKAYKGSLISPYELRFRALNELLSKQDFARVILHIAKRRGYDDIKNSDDKEKGAILKAIKQNEEKLANYQSVGEYLYKEYFQKFKENSKEFTNVRNKKESYERCIAQSFLKDELKLIFKKQREFGFSFSKKFEEEVLSVAFYKRALKDFSHLVGNCSFFTDEKRAPKNSPLAFMFVALTRIINLLNNLKNTEGILYTKDDLNALLNEVLKNGTLTYKQTKKLLGLSDDYEFKGEKGTYFIEFKKYKEFIKALGEHNLSQDDLNEIAKDITLIKDEIKLKKALAKYDLNQNQIDSLSKLEFKDHLNISFKALKLITPLMLEGKKYDEACNELNLKVAINEDKKDFLPAFNETYYKDEVTNPVVLRAIKEYRKVLNALLKKYGKVHKINIELAREVGKNHSQRAKIEKEQNENYKAKKDAELECEKLGLKINSKNILKLRLFKEQKEFCAYSGEKIKISDLQDEKMLEIDHIYPYSRSFDDSYMNKVLVFTKQNQEKLNKTPFEAFGNDSAKWQKIEVLAKNLPTKKQKRILDKNYKDKEQKDFKDRNLNDTRYIARLVLNYTKDYLDFLPLSDDENTKLNDTQKGSKVHVEAKSGMLTSALRHTWGFSTKDRNNHLHHAIDAVIIAYANNSIVKAFSDFKKEQESNSAELYAKKISELDYKNKRKFFEPFSGFRQKVLDKIDEIFVSKPERKKPSGALHEETFRKEEEFYQSYGGKEGVLKALELGKIRKVNGKIVKNGDMFRVDIFKHKKTNKFYAVPIYTMDFALKVLPNKAVARSKKGEIKDWILMDENYEFCFSLYKDSLILIQTKDMQEPEFVYYNAFTSSTVSLIVSKHDNKFETLSKNQKILFKNANEKEVIAKSIGIQNLKVFEKYIVSALGEVTKAEFRQREDFKK

SEQ ID NO: 387 - protein, 1003 aa, Campylobacter lari]
MRILGFDIGINSIGWAFVENDELKDCGVRIFTKAENPKNKESLALPRRNARSSRRRLKRRKARLIAIKRILAKELKLNYKDYVAADGELPKAYEGSLASVYELRYKALTQNLETKDLARVILHIAKHRGYMNKNEKKSNDAKKGKILSALKNNALKLENYQSVGEYFYKEFFQKYKKNTKNFIKIRNTKDNYNNCVLSSDLEKELKLILEKQKEFGYNYSEDFINEILKVAFFQRPLKDFSHLVGACTFFEEEKRACKNSYSAWEFVALTKIINEIKSLEKISGEIVPTQTINEVLNLILDKGSITYKKFRSCINLHESISFKSLKYDKENAENAKLIDFRKLVEFKKALGVHSLSRQELDQISTHITLIKDNVKLKTVLEKYNLSNEQINNLLEIEFNDYINLSFKALGMILPLMREGKRYDEACEIANLKPKTVDEKKDFLPAFCDSIFAHELSNPVVNRAISEYRKVLNALLKKYGKVHKIHLELARDVGLSKKAREKIEKEQKENQAVNAWALKECENIGLKASAKNILKLKLWKEQKEICIYSGNKISIEHLKDEKALEVDHIYPYSRSFDDSFINKVLVFTKENQEKLNKTPFEAFGKNIEKWSKIQTLAQNLPYKKKNKILDENFKDKQQEDFISRNLNDTRYIATLIAKYTKEYLNFLLLSENENANLKSGEKGSKIHVQTISGMLTSVLRHTWGFDKKDRNNHLHHALDAIIVAYSTNSIIKAFSDFRKNQELLKARFYAKELTSDNYKHQVKFFEPFKSFREKILSKIDEIFVSKPPRKRARRALHKDTFHSENKIIDKCSYNSKEGLQIALSCGRVRKIGTKYVENDTIVRVDIFKKQNKFYAIPIYAMDFALGILPNKIVITGKDKNNNPKQWQTIDESYEFCFSLYKNDLILLQKKNMQEPEFAYYNDFSISTSSICVEKHDNKFENLTSNQKLLFSNAKEGSVKVESLGIQNLKVFEKYIITPLGDKIKADFQPRENISLKTSKKYGLR

SEQ ID NO: 388 - protein, 372 aa, candidate division
DNESAINQIAYILTTQKADEGIRAELDSLPLSDKAKKAIVKIKPTNFKAFGHLSIKALQKITPHILEGMTYDKACEAAGYDFKKQSASLEQITNPVVKRAITQTLKVVRAIERKYGKPYFIKVETARDLAKNFKDRNAIKKENEENQGYNEDIKSIITNGYEASPKTKGGKQLLNHLKEFNVRLNKNADFNGQQIIKVKLYREQQGKCLYSGNPIDFETMLRDDNAYQVDHIVPFSRSNNDGITNKVLVFTEENQKKADRTPFEYFGTDERRWEKFVALVETTYKTRDVKTSDKATNAINYEYNGYAMKKKQNLLLQDYKNDSWNVRALNDTRYITRFIQNYLRQNVDFAEGEEKQRIIAPNGTTTAYLRKR

SEQ ID NO: 389 - protein, 1117 aa, Capnocytophaga ochracea
MKHILGLDLGSNSIGWAFVQQDFENKQGKIIATGSRIIPMDQGILGDFERGNTVSQTAERTTYRSMRRLRERHLLRRERLHRVLHLLGFLPPHYDAQIDFTKRYGKFIDNAEPKIAYNNGNFIFMNSFNEMVEDFKKHQPQLFYKKSNGEESRIPYDWTIYYLRKKALSQKITQQELAWLILHFNQKRGYYQLRGEEETENPNKEVAFHSLKVVDVEAEAPNKKGEIWYTIRLENGWIYRRTSKNPLDDWKGKTRDFIVTTDLNDDGTIKLDKEGKEKRSFRAPDENDWNLLKKKTEHDIDFSGKPVGTYIYDHLLQNPNQKIKGKLVRTIERKYYKDELKAILAKQIALQPELFTETLLADCIRELYRKNETQQQNLLSKDFLHLFVEDIIFYQRPLCSKKSTIANCTLEKRSYIDKETNERKDAPIKVCAKSNPYYQEFRVLQWLQNLRIYEIETDREVTAEFIETPQDYEALFNFLMSQKEIDNEGLLKYFLFAKNPQIKDKAAKSELKKWLTTYRWNYVYDAADNSSKKYPMNETGYELQRYLQKVEGLPANFLTFDITYQLWHLLYSVKDKVEFEKALKKFAKKKQLDKTSFVDSFKNFKPYPNEYGSFSEKAIKKLLPLMRFGNHWDFNRIDVSTQKRIDDLINGVANEDIRTIIREKAEKYQLNSETCFQDLPLWLAQYVVYNRHAEATDIEKWTSVSDLEAYLEDFKQHSLRNPIVEQVVTETLRVVRDIWQQYSGGQANFFDEIHIELGRELKKTAEERKQLSDKNQENENTNLRIKKLLAELKEDASIQNVRPYSLVQQELLKIYEEGVFSSTDEIEEDIQKIRKKVEPTPPEIQRYKLWLEQKYKSPYTGEVISLTKLFTEEYEIEHIIPQSRYYDDSLSNKVICESAVNKLKTNQLGLEFIQNHHGEKVRITANKEVTIFTEEQYKEFVKKHYANNSAKQQKLLLNEIPEKMVARQLNDTRYISKCISEILSKIVRSDEKDEGVNSKNIIPCTGKITTALKQDWGLNDVWNELILPRFERMNQLTQTQLFTSYNDRLQKNLPTVPIEYSQGFQKKRIDHRHHAMDALVIACATREHINYMNNQHALDKSKDKKEKQQSRIDLHPL

SEQ ID NO: 390 - protein, 303 aa, Capnocytophaga ochracea
MSFKQNLRVINKATNYYEKWEEKNGVLVKKKVKQEGTNWAIRKPLHKETVSGKIVLDRKIGKDKILTATRKAVDITFTEKIISSITDTGIQKILLNYLKYKGSPEVAFSAEGLEELNKNIAQYNDGKKHQPIYKVRIFEEGSKFPLGETGAKATKYVEAAKGTNLFFGVYQGKEKRTYATIPLNEVIERQKQGLPSVPERNEKGEPLLFSLSPNDLVYVPMEGEIAETIDFNNLSKEQKERIYKTVSFTGNQCFFVQEAVASPIVNKMEYSPLNKMERDILGIMIKEVCVKLKVDRLGNIIKA

SEQ ID NO: 391 - protein, 1471 aa, Capnocytophaga sp.
MCKYFYIKNFITFVLSKSIIPMKHILGLDLGSNSIGWAFVQQDFENKQGKIIATGSRIIPMDQGILGDFERGNTVSQTAERTTYRSTRRLRERHLLRRERLHRVLHILGFLPPHYDAQIDFTKRYGKFIDNAEPKIAYNNGNFIFMNSFNEMIEDFKKHQPQLFYKKSNGEESKIPYDWTIYYLRKKALSQKITQQELAWLILHFNQKRGYYQLRGEEETENPNKEVAFHSLKVVDVEAEAPNKKGEIWYTIRLENGWIYRRTSKIPLDDWKGKTRDFIVTTDLNDDGTIKVDKEGKEKRSFRAPDENDWNLLKKKTEHDIDFSGKTVGAYIYDHLLQNPNQKIKGKLVRTIERKYYKDELKAILAKQIALQPELFTETLLADCIRELYRKNETQQQNLLSKDFLHLFVEDIIFYQRPLRSKKSTIANCTLEKRSYIDKETNERKDAPIKVCAKSNPYYQEFRVLQWLQNLRIYEIETDREVTAEFIETPQDCEALFNFLMSQKEIDNKGLLKYFLFAKNPQIKDKAAKSELKKWLTTYRWNYVYDAADNSSKKYPMNETGYELQRYLQKVEGLPANFLTFDITYQLWHLLYSVKDKVEFEKALKKFAKKKQLDKTSFVDSFKNFKPYPNEYGSFSEKAIKKLLPLMRFGNHWDFNRIDVSTQKRIDDLINGVANEDIRTIIREKAEKYQLNSETCFQDLPLWLAQYVVYNRHAEATDIEKWTSVSDLEAYLEDFKQHSLRNPIVEQVVTETLRVVRDIWQQYGGGQANFFDEIHIELGRELKKTAEERKQLSDKNQENESTNLRIKKLLAELKEDASIQNVRPYSLVQQELLKIYEEGVFSATDEVEEDIQKIRKKAEPSKADLQRYKLWLEQKYKSPYTGEVISLTKLFTEEYEIEHIIPQSRYYDDSLSNKVICESAVNKLKTNQLGLEFIQNHHGEKVRITANKEVTIFTEEQYKEFVKKHYANNSAKQQKLLLNEIPEKMVARQLNDTRYISKYISEILSKIVRSDEKDEGVNSKNIIPCTGKITTALKQDWGLNDVWNKLILPRFERMNQLTQTQLFTSYNDRLQKNLPTVPIEYSQGFQKKRIDHRHHAMDALVIACATREHINYMNNQHALDKSKDKKEKQQSRIDLRTILCEKKNNNWQFKKPWSTFTQEAKEALEHIVVSFKQNLRVINKATNYYEKWEEKNGVLVKKKVKQEGTNWAIRKPLHKETVSGKIVLDRKIGKDKILTATRKAVDITFTEKIISSITDTGIQKILLNYLKYKGSPEVAFSTEGLEELNKNIAQYNNGKKHQPIYKVRIFEEGSKFPLGETGAKATKYVEAAKGTNLFFGVYQGKGKRTYATIPLNEVIERQKQGLPSVPERNEKGEPLLFSLSPNDLVYVPMEGEIAETIDFNNLSKEQKERIYKTVSFTGNQCFFVQEAVATPIVNKMEYSPLNKMERDILGTMIKEVCIKLKVDRLGNITKA

SEQ ID NO: 392 - protein, 1450 aa, Capnocytophaga sp.
MKHILGLDLGSNSIGWAFVQQDFENKQGKIIATGSRIIPMDQGILGDFERGNTVSQTAERTTYRNTRRLRERHLLRRERLHRVLHILGFLPPHYDSQIDFTKRYGKFIDNAEPKIAYNNGNFIFMNSFNEMIEDFKKYQPQLFYKKSNGEESKIPYDWTIYYLRKKALSQKITQQELAWLILHFNQKRGYYQLRGEEETENPNKEVAFHSLEVVDVEAEAPNKKGEIWYTIRLENGWIYRRTSKIPLDDWKGKTRDFIVTTDLNDDGTIKLDKEGKEKRSFRAPDENDWNLLKKKTEHDIDFSGKTVGAYIYDHLLQNPNQKIKGKLVRTIERKYYKDELKAILAKQIALQPELFTETLLADCIRELYRKNETQQQNLLSKDFLHLFVEDIIFYQRPLRSKKSTIANCTLEKRSYIDKETNERKDTPIKVCAKSNPYYQEFRVLQWLQNLRIYEIETDREVTAEFIETAQDNEALFNFLMSQKEIDNESLLKYFLFAKNPQIKDKVAKSELKKWLTTYRWNYVYDAADNSSKKYPMNETGYELQQYLQKVEGLPANFLTFDITYRLWHLLYSVKDKVEFEKALKKFAQEYQLDEASFVDSFKNFKPYPNEYGSFSEKAIKKLLPLMRFGNHWDFNRIDVSTQKRIDDLINGVANDEIRTIIREKAEKYQLNSETCFQGLPLWLAQYVVYNRHAEAADIEKWTSVNDLEAYLEDFKQHSLRNPIVEQVITETLRVVRDIWQRYGGGQANFFDEIHIELGRELKKTAEERKQLSNRNQENENTNLRIKKLLAELKEDASIQNVRPYSPVQQELLKIYEEGVFSATDEVEEDIQKIRKKAEPTTPEIQRYKLWLEQKYKSPYTGEVISLTKLFTEEYEIEHIIPQSRYYDDSLSNKVICESAVNKLKTNQLGLEFIQNHHGEKVRITANKEVTIFTEEQYKEFVKKHYANNSAKQQKLLLNEIPEKMVARQLNDTRYISKYISEILSKIVRSDEKDEGVNSKNIIPCTGKITTALKQDWGLNDVWNELILPRFERMNQLTQTQLFTSYNDRFQKNLPTVPIEYSQGFQKKRIDHRHHAMDALVIACATREHINYMNNQHALDKSKDKKEKQQSRIDLRTILCEKKNNNWQFKKPWSTFTQEAQEALEHIVVSFKQNLRVINKATNYYEKWEEKNGVLVKKKVKQEGTNWAIRKPLHKETVSGKIVLDRKIGKDKILTATRKSVDITFTEKIISSITDTGIQKILLNYLKYKGSPEVAFSAEGLEELNKNIAQYNDGKKHQPIYKVRIFEEGSKFPLGETGAKATKYVEAAKGTNLFFGVYQGKGKRTYATIPLNEVIERQKQGLPSVPERNEKGEPLLFSLSPNDLVYVPMEGEIAETIDFNNLSKEQKERIYKTVSFTGNQCFFVQEAVATPIVNKIEYSPLNKMERDILGTMIKEVCIKLKVDRLGNITKA

SEQ ID NO: 393 - protein, 1435 aa, Capnocytophaga sp.
MKNILGLDLGTTSIGFAHIVEDENKEKSEIKELGVRIVSLATDEQSDFEKGKSISTNANRTLKHGARLNLDRYQQRRKFLIDLLQKANLITSASILAENGKNTTHSTWQLRAKAVTERIEKEEFARVLLAINKKRGYKNSRKTKTEDEGQAIDGMAIAKCLYDENLTPGQLSLQLLQQNKKLLPDFYRSDLQKEFDLVWNLQKQFYPDILTDSFYKELQGKGKDATSKAFSKRYHFDTAENKGSKESVRLQAYQWRAEAISKQLSKEEVAYVLTEINNNLNNSSGYLGAISDRSKELYFNRQTVGQYLYAQLQENRHNSLKNKVFYRQDYLDEFERIWETQASFHKELTDELKKQIRDVVIFYQRKLKSQKGLVSFCEFESKEIEIEKDGKAITKSIGARVVPKSSPLFQEFKIWQILNNVTCKRKGIRKKKSSAKSTELDLFNEPSQSIFSLDMECKQLLFDELNLKGDLKSDKVLKLLGYSPQEWEINYNQLEGNRTQKSLYEAYLKIIEIEGYEVKDILQIKSTKDDWSLDESPLSASEIRERVKVIFQTLGICTKILYFDPLLPVKEFEQQYSYQLWHLLYSYESDDSTSGNETLYRILEKKYAFKREHATILANVALQDDYGSLSTKAIRKIYPYIKENQYSTACELAGYKHSKLSLTTEELEARELKNIIPLLKKNALRNPVVEKILNQMINVVNALIEKNSERDAEGKITKYFHFDEIRIELARELKKNAQERYEMTQNINKAKLEHQKISEKLQKQFGIKNPTKSDIIRYRLYQELEHNGYKELYTNTYIAPDVLFSKNIDIEHIVPKARVFDDSFSNKTLAFKEFNIKKGESTAFDYITSLNCEGELNQYLTRVENAYKTKSISLTKYKNLLKKASEIGDGFINRDLRDTQYIAKKAKEILFQVTKNVLSTSGSITDRLREDWGLVDVMKELNMPKYQSLGLTEVEERKDGNKVTVIKDWTKRNDHRHHAMDALTVAFTKPSYIQYLNHLNARKDENNKNYSVILAIEKKETIKVPINNGKNKRVFIEPILNFRQVAKKHLEEIFISHKAKNKVVTKNINKPAGTDKQQITLTPRGQLHKETIYGKYQYYVNKEEKVGVKFDERTITKVSNPLYREALLKRLQANDNDPKKAFAGKNALSKNPIYLDEAKTKTLPEKVNLTYLEEDFSIRKDISPDNFKDLKSIEKVIDQGVKRILIKRLQAYDNDPKKAFVDLEKNPIWLNKEKGIAIKRVTISGVSNAQPLHIGKDHLGKTTLNKEGKEVPVDYVSTGNNHHVAIYRDKEGNLQEQIVSFFEAVVRAQQGLPIIDKNYKQAEGWQFMFTMKQNEMFVFPNEATGFNPAEIDLLDPKNKKLISPNLFRVQTISIVKYGNSVVRDFKFRHHLETTLQDDKILQGITFQQIKSLEPLRNIVKVRINHLGDIVNIGEY

SEQ ID NO: 394 - protein, 1432 aa, Capnocytophaga sp.
MKNILGLDLGTTSIGFAHIVEDENKEKSEIKELGVRIVSLTTDEQSDFEKGKSITTNANRTLKHGARLNLDRYQQRRKYLIDLLHKANLITPSSILAENGKNTTHSTWQLRAKAVTERIEKEEFARILLAINKKRGYKSSRKAKTEDEGQAIDGMAIAKRLYDENLTPGQLSLQLLQQNKKLLPDFYRSDLQKEFDLVWNFQKQFYPDILTDIFYKELQGKGKDATSKAFSKRYHFDTAENKGSKESVRLQAYQWRAEAVSKQLSKEEVAYVLTEINNNLNNASGYLGAISDRSKELYFNRQTVGQYLYAQLQENRHNSLKNKVFYRQDYLDEFERIWETQALFHKELTDELKKQIRDVVIFYQRKPKSQKGLISFCEFESKEIEIEKDGKTITKNIGARVVPKSSPLFQEFKIWQILNNVICKRKGIRKKKISAKTTQLDLLNESSQTIFSLDMECKQLLFDELNLKGDLKSDKVLKLLGYSPQEWEINYNQLEGNRTQKALYEAYLKIVEMEAHDVKDILQIKSTKDDWSLDESPLSASEIRESVKAIFQALGICTKILYFDPLLPVKDFEEQDSYQLWHLLYSYESDDSTSGNETLYRILEKKYAFKREHARILANVALQDDYGSLSTKAIRKIYPNIKENQYSTACEMAGYKHSKLSLTTEELEARELKNIIPLLKKNALRNPVVEKILNQMINVVNALIEKNSERDAEGKITKYFHFDEIRIELARELKKNAQKRYEMTQNINKAKSEHQKISEILQKEFGIKNPTKSDIIRYRLYKELEHNGYKELYTNTYIAPDVLFSKNIDIEHIVPKARVFDDSFSNKTLAFKDFNIKKGESTAFDYITSLKNEEKLNQYLARVENAYKTKNISPAKYKNLLKKASEIGDGFINRDLRDTQYIAKKAKEILFQVTKNVLSTSGSITDRLREDWSLVDVMKELNMPKYQSLGLTEVEERKDGNKVTVIKDWTKRNDHRHHAMDALTVAFTKPSYIQYLNHLNARKDENNKNYSVILAIEKKETIKVPTNNGKNKRVFIEPIPNFRQVAKKHLEEIFISHKAKNKVVTKNTNKPAGTNKQQITLTPRGQLHKETIYGKYQYYVNKEEKVGVKFDKETIAKVSNPLYREALLKRLQANDNDPKKAFTGKNALSKNPIYLDEAKTKTLPEKVNLTYLEEDFSVRKKIVPKNPTSKEFVPNLKSIEKVVDEGVRNILIERLRVYNNDPEKAFVDLEKNPIWLNKEKGIAIKRVTISGVNNAQPLHIGKDHLGKTTLNKEGKEIPVDYVSTGNNHHVAIYRDKEGNLQEQIVSFFEAVVRTQQGLPIIDKTYKQEEGWQFLFTMKQNEMFVFPNEATGFNPAEIDLLDPKNKKQISPNLFRVQKIATKDYFFRHHLETNVETDNVLKNTTWKREGLSGLKDIVKVRINHLGDIVSIGEY

SEQ ID NO: 395 - protein, 1426 aa, Capnocytophaga sp.
MKNILGLDLGTTSIGFTHIVEDENKEKSEIKELGVRIVSLTTDEQSDFEKGKSISTNANRTLKHGARLNLDRYQQRRKFLIDLLQKANLITSSSILAENGKNTTHSTWQLRAKAVTERIEKEEFARVLLAINKKRGYKSSRKAKTEDEGQAIDGMAIAKRLYDENLTPGQLSLQLLQQNKKLLPDFYRSDLQKEFDLVWNFQKQFYPDILTDSFYKELQGKGKDATSKAFSKRYHFDTAENKGSRESVRLQAYQWRAEAISKQLSKEEVAYVLTEINNNLNNASGYLGAISDRSKELYFNRQTVGQYLYAQLQENKHNSLKNKVFYRQDYLDEFERIWETQASFHKELTEELKKQIRDVVIFYQRKLKSQKGLISFCEFESKEIEIEKDGKTITKSIGARVVPKSSPLFQEFKIWQILNNVTCKRKGIRKKKSSAKSTELDLFNEPSQTIFSLDMECKQLLFEELNLKGDLKSDKVLKLLGYSPQEWEINYNQLEGNRTQKALYEAYLKIVEMEAHDVKDILQIKSTKDDWALEESPLSASEIRERVKAIFQTLGICTKILYFDPLLPVKEFEEQDSYQLWHLLYSYESDDSTSGNETLYRILEKKYAFKREHATILANVTLQDDYGSLSTKAIRKIYPYIKENQYSTACEKAGYKHSKLSLTTEELEARELKNIIPLLKKNALRNPVVEKILNQMINVVNALIEKNSERDAEGKITKYFHFDEIRIELARELKKNAQERYEMTQNINKAKLEHQKISGILQKEFGIKNPTKSDITRYRLYQELAHNGYNDLYTNTYIPKELLFSKNIDIEHIVSKARVFDDSFSNKTLAFREFNIKKGESTAFDYITSLNNEEELNQYLNRVENAYKTKNISPAKYKNLLKKASEIGDGFINRDLRDTQYIAKKAKEILFQVTKNVLSTSGSITDRLREDWGLVDVMKELNMPKYQSLGLTEVEERKEGNKVTVIKNWTKRNDHRHHAMDALTVAFTKPSYIQYLNHLNARKDKNNKNYSVILAIEEKETIKVPTNNGKNKRVFIEPIPNFRQVAKKHLEEIFISHKAKNKVVTKNTNKPAGTDKQQITLTPRGQLHKETVYGKYQYYVNKEEKIGVKFDKETIAKVSNPVYREALLKRLQANDNDPKKAFAGKNALSKNPIYLDEAKTKTLTEKVNLTYLEEDFSIRKDISPDNFKDLKSIEKVIDQGVKRILIKRLQDYDNDPKKAFVDLEKNPIWLNKEKGIAIKRVTISGVNNAQPLHIGKDHLGKTTLNKEGKEIPVDYVSTGNNHHVAIYRDKEGNLQEQIVSFFEAVVGAQQGLPIVDKTYKQAEGWQFLFTMKQNEMFVFPNEATGFNPAEIDLLDPKNKKQISPNLFRVQKIATKDYFFRHHLETNVDTDNVLKNTTWKREGLSGLKDIVKVRINHLGDIVSIGEY

SEQ ID NO: 396 - protein, 1450 aa, Capnocytophaga sp.
MKRILGLDLGSNSIGWAFVEQDFENKQGKIIATGSRIIPMDQGILGDFEKGNTVSQTAERTTYRSMRRLRERHLLRRERLHRVLHILGFLPPHYDAQIDFTKRYGKFIDNAEPKIAYNNGNFIFMNSFNEMIEDFKKYQPQLFYKKSNGEESKIPYDWTIYYLRKKVLSQKITQQELAWLILHFNQKRGYYQLRGEEETENPNKEVAFHSLKVVDVEAEAPNKKGEIWYTIRLENGWIYRRTSKIPLDDWKGKTRDFIVTTDLNDDGTIKVDKEGKEKRSFRAPDENDWNLLKKKTEHDIDFSGKTVGAYIYDHLLQNPNQKIKGKLVRTIERKYYKDELKAILAKQIALQPELFTETLLADCIRELYRKNETQQQNLLSKDFLHLFVEDIIFYQRPLRSKKSTIANCTLEKRSYIDKETNERKDTFIKVCAKSNPYYQEFRVLQWLQNLRIYEIETDREVTAEFIETAEDYEALFNFLMSQKEIDNEGLLKYFLFAKNPQIKDKVAKSELKKWLTTYRWNYVYDAADNSSKKYPMNETGYDLQRYLQKVEGLPANFLTFDITYRLWHLLYSVKDKVEFEKALKKFAQEYQLDEASFVDSFKNFKPYPNEYGSFSEKAIKKLLPLMRFGNHWDFNRIDVSTQKRIDDLINGVANDEIRTIIREKAEKYQLNSESCFQGLPLWLAQYVVYNRHAEATDIEKWTSVSDLETYLEDFKQHSLRNPIVEQVVTETLRVVRDIWQQYGGGQANFFDEIHIELGRELKKTAEERKQLSNRNQENENTNLRIKKLLAELKEDASIQNVRPYSPVQQELLKIYEEGVFSSTDQVEEDIQKIRKKAEPTTPEIQRYKLWLEQKYKSPYTGEVISLTKLFTEEYEIEHIIPQSRYYDDSLSNKVICESAVNKLKTNQLGLEFIQNHHGEKVRITGNKEVTIFTEEQYKEFVKKHYANNSAKQQKLLLNEIPEKMVARQLNDTRYISKYISEILSKIVRSDEKDEGVNSKNVIPCTGKITTALKQDWGLNDVWNELILPRFERMNQLTQTQLFTSYNDRFQKNLPTVPIEYSQGFQKKRIDHRHHAMDALVIACATREHINYMNNQHALDKNKDKKEKQQSRIDLRTILCEKKNNNWQFKKPWSTFTQETKEALEHIVVSFKQNLRVINKATNYYEKWEEKNGVLVKKKVKQEGTNWAIRKPLHKETVSGKIVLDRKIGKDKILTATRKEVDITFTEKIISSITDTGIQKILLNYLNYKGSPEVAFSAEGLEELNKNIAQYNDGKKHQPIYKVRIFEEGSKFPLGETGAKATKFVEAAKGTNLFFGVYQGKEKRSYATIPLNEVIERQKQGLPSVPERNEKGEPLLFSLSPNDLVYVPMEGEIAETIDFNNLSKEQKERIYKTVSFTGNQCFFVQEAVATPIVNKMEYSPLNKMERDILGTMIKEVCIKLKVDRLGNITKA

SEQ ID NO: 397 - protein, 1437 aa, Capnocytophaga sp.
MKYIKYILGLDIGSNSIGWALIQLDLLQKTKRIIATGSRIIPMDQKVLSDFGKGITISPTAQRTSYRNARHCRERHLLRRERLHRVLHILGFLPTHYDKQIDFSKRYGKFVDNTEPKIAYNERKFLFMDSFQEMLADFKIHQPDLFYTKKNGEESKIPYDWTIYYLRKKALSRKISKEELAWIILNFNQKRGYYQLREEEEENKENDFEIISSKIISVIKKDKDKKYNKYWYDIILENGLVYQAAFYNDFVYNWINQDREFIIERISLKNGTEKVKLSYLPTFDEIDKMDKKEQDKYYKKIKIKTENSIGNKTVGCYIYDHILQNPNEKIKGKLVRTIERKYYKEELKAILEKQVALQPELFTDQLFADCIRELYSKNEAQQRNLAARDFVHLFVEDIIFYQRSLRRQKSTLANCSLESRSYIDKDSHTRKEAPLKVCPKSNPYYQEFRVLQWLQNLKIYEIDTDQEVTHEFIKTLEDKQQFFDFLMNQKEIDCEELLKYFLNQTYPNAREKALKSELKKWKDTYRWNYVYDIGEKSSKKYPMNETRYELKRHLEKVANLPDDFLSSEVEYLLWHLIYSVKDKVAYEKGLKTFAQKHHLDKDSFVESFKKFKPYPSEYGSFSEKAIRKLLPLMRFGSYWDFNHIDKNTQKRIEDLITGVENEEIRTILREKAEKYQLEKETDFQDLPLWLAQYIVYNRHAEASSLEKWTSVNDLETYLNEFKQYSLRNPIVEQVVMETLRVVRDIWQQYGQGQASFFDEIHIELGRELKKTAKEREKLSKQNQKNEDINLSIKEKLKELEKYNTRAYSITHQEKYKLWLEQKHISPYTGQIISPENLFTDNYEIEHIIPQSRFFDDSLSNKVVCESIVNKAPYKDRQLGLEFIKNQGGRIVKELSTENKTIKIFTEEQYRTFIKEHYSNNPEKTKKLLLEEIPEKMVARQMNDTCYISKFISEILSKIVRSDEQDEGVHSKNVILCTGKITSALKQDWGVNDVWNDLILPRFERMNDLTQSTLFTTYNEKYQKYLPTVPMEYSNGFQKKRIDHRHHAMDAIIIACATREHINYINNQHALEKGKDKKEKQKEHDKLREKLCIKKDNKGSEENYSWIFKKPWDTFTQEVQAALEGIVVSFKQNLRVINKATNYYERWVEENGKYIKKMVKQEGTNWAIRKPLHEETISGKIYLDREEITKNDILTATRKTVDSSFDEKRIKKITDTGIQKILLNYLKYKGSPEIAFSPEGLEELNKNLSIYNDGKPHKPIYKVRIYEKGSGRFALGEKGRKYKKYVQGAPNLYFGIYQGANKRSFATIPLNEVIERQKQGRPSIPEYNEKGDPLLFSLSPNDLVYVPVEGEIIEDIDFQNLSKEQKERIYNVNDFSSTCYFTPNRIAKAIFPKEVDLQRKGDKLPGSYDTKTASLEGIQIKEVCIKLKIDRLGNISKA

SEQ ID NO: 398 - protein, 1140 aa, Catellicoccus marimammalium
MKNMTKVNVGLDVGISSAGWSVINAETNQILESGVRLFSGSDADENVNRRNQRQGRRLFRRRKLRIQEAKKYLENVFQLKDIEPKDEWNPYEIRVRALNEKVSKEELSIALLNIVKHRGISYELEDVTDEEGTNTQSFQSGLDYNRRLLKTKTVGEIQYDRLQKYGQVRGQIQTEDGLLINIFPTKNYVEEVERILETQKKYHPEIDDVFIEKIISFVTRKREYFVGPGNEKSRTDYGIYRENGETLDNLFEILIGKDKFYPEEYRAAGSSYTAQIFNLLNDLNNLRIPTTEDHHLTKAQKEEIITELKNTSRLSGGMLKLISKVTKAPKEEISGYRKDEKDKPDLHSLAYYRKQKNMLEKEGIQIADFSEELLDELATMMTLNTEPGEIRKQLNKITNQYDILTPEVIEVLVKNHTAFVATSNHKWHRFSLKLMKEFIPELLETSKEQSTILCERGFIQNRASYLDENHHFNYAELRENLYNPVVRKSTCEMLKVFTAIQEKYPNIQNVIVELPRETNEDEQKRKIKKINDNNAKRKKEILKEAQAQSGLSEEALEEKLLKTKGLYLKLMLWYEQEGKCVYSGQEIPLSDLLQNKGGYEVDHIIPISISFDDRLCNKVLVRQQLNSQKSNQTPFEYMTTHTDGHLSFHELKELVGKNKRFSKEKRELLLAEIYSNDIETRKRFINRNLVDTSYTARIVLNALQQYKKENQLSMNVSVVRGAMTNILRKKVKLDKTRETFHHHAIDASLMAVIPNIEFFKERKEWLPKSANEEVVEVEVSEEETMPEKEFKVKMRLPESFIQDVQILQRNSFAKEEVSGPQTRERNLKIKFSHQVDQKMNRKVADDTIYGTRQAQLGKDKKEETYVIGKIKDIYNYDEYVRFKKRYDKNKESFLMYHHDPQTFEKLEEILAQYPEYIEDEKGKKKKVSPFALYREENGPVTKYAKKNNGPVIKQLKYYDSKLNRKIDISHKYSTKNRQVVLQSLKPYRTDVYRNQDTGEYTLVGIDQNDGKFVNGHYGIPKSRYEEIKANNKLSEHDEFVFSLYKNSMVKVIDENGESIVVRYLSRSMPNRKNNAEIKPVEKYQFEDGEVVPVYGKCRKQMQTVFVKKGWTLLKGNTDILGNTYFVEKESENPKKMIDDK

SEQ ID NO: 399 - protein, 1419 aa, Chryseobacterium sp.
MMIKNILGLDLGTNSIGWALIKQNFENKYGEILGMGSRIIPMSQDVLGEFGKGNSVSQTAARTGYRGVRRLRERFLLRRERLHRVLNVLNFLPEHYASQIDFEKRFGKFKYETEPKLAYNNDGFFFKNSFDEMLGDFKDHQFHLLENGRKVPYDWTIYYLRKKALSQKIEKEELAWILLNFNQKRGYYQLRGEDFEEEKDRVFVRLKVDRVVDSGENIKGKILYDVYFENGWKYEKQIVKTEDWIGRTKEFIVTESILKNGDTKRTFKAVDSEKDWIAIKTKTEQEIDKSHKTVGAYIYEALLQNPKQKIKGKLVRTIERKFYREELKKILERQKEFHPELQSDDLYNDCIRELYRNNEAHQITLSKKDFVHLLLNDLIFYQRPLRSQKSSVSNCTLEFRKYKDENGVEHAQYLKTIPKSNPYYQEFRVWQWMFNLNIYRKDDDTNVTKEFLSSTEDYETLFEFLNNRKEVDQKALLRHFKLNEKTHRWNYVEDKKYPCNETKTMISTRLEKVENYPSDFLTREMEQNIWHIIYSVNDKIEYEKALKSFAHKNNLDENSFFEAFKKFPPFKSEYGSFSEKAIKKLLPLLRLGKYWNWESIDRKSQGRIEKIITGEFDGNIKDKVREKAIHLTAENDFQGLQLWLAQYIVYGRHSEASMIGKWNSADDLEEFLKGFKQHSLRNPIVEQVITETLRVVKDIWLKYGNGAKDFFSEIHIELGREMKQTKDERVDATKRITENENTNLRIKALLAEMMNDNSVENIRPYSPMQQEILKIYEDGILKSDIEIDDDILKISKTAQPSSSDLKRYKLWLEQRYKSPYTGQIIPLNKLFTSEYEIEHIIPQSRYFDDSFSNKIICESAVNKLKDNYIGLGFIKQFGGMIVECGFGKSVEIFKAEEYEDFVKKHYANNRSKRNKLLLEEIPEKMIDRQLNDTRHISKYISGVLSNIVRQEDGTDEGVNSKNIVPGNGKITTQLKQDWGLNDVWNELILPRFERMNQLTNSTDFTSWNKNHQKFLPTVPIEFSKGFSKKRIDHRHHAMDALVIACATKDHINLLNNQSAKSDTKRYDLKRKLMKFERVVYSHSKTGEKIEKEVPKQFLKPWDNFTVDAKNKMETIIVSFKQNLRVINKATNHYEKWIEKDGIKRKELIKQEGTNWAIRKPMHKETVSGKVDLPGIKIPKGKILTATRKSLDTSFDLKTINSITDTGIQKILKNYLEFKGSSELAFSPEGIEDMNKNIEKFNDGKPHQSINKVRIFELGSKFSVGQTGNKKDKYVEAAKGTNLFFAVYEDKNGKRSYETIPLNEVIERQKQGLDSVSFKNKEDFLLCPNDLVYVPSEDELENIYNIDFKNLTTEKTGNIYKVVSFSGNQIFFIRQDIAISIVNKAEFSTLNKMERAIDGSMIKENCIKLKIDRLGNIAKI

SEQ ID NO: 400 - protein, 1065 aa, Clostridium perfringens
MNKDINYALGLDIGITSVGWAVINLDLNRIEDLGVRIFNAAENPKDGSSLALPRRLARGRRRLLRRKAYRVERVRKLIVKNNILTKEELEGLFKNKEVIDVWEARVKGLDYKLSREEWAKILINFCKRRGFKSNRKNETKDKEAGQILSSISYNIEKMKETNSRTIGEYIYNEVKNSDDSYAPLRNKFGEYKMCVSRDVLREEIHTLFEKQRELGNNFASDEIEDKYFEIFNSQRPFSNFEDLEKLVGFCTFERKKHKRAPKHCISSEEFTLYEGINKLSIIKDGEKRKLSEEERTLVVNEAFNKKEIKYTTLRKLLGLSEDELFSTLTYSIDKDISKTENTKFVSLKGYHEIKRAIEKGVSKKAWQDIENNRNLLNDIAYVLTLGKTDDEIEKQLRLRNVPEELFESLLDMSFSKFNNLSIYALEKILPFMKEGYQYNEACEKAGYNFKAIYEGVRTKKLPVIEIDEIVNPVVNRALAQTRKVINSVIDKYGSPVRINIELARDLAKNFKDRKLIEKEQKENRANLDKIRENLRELMDKEPTAVEVLKYRLWEQQRGECAYTQSQIALERLFSPGYCEIDHIIPFSRSFDDSLSNKILVLGSENQRKGNKIPYEYFGEDSERWNSFEIWVKGSYLNYKKKANLLKKKFTEEEQRDWKARNLQDTKYICRYISNFVNNRLEFKESENKQKVITVNGRATAYLRSRWGLNKVREDGDKHHALDAAVVGVTTQGMVQKISKYSKAHELYTVRKNDEFVDVETGECVDVDEYKEIRKDILPRPWRGFSEELKLRLSDNPLEELKKLPIETYNEEFIKENVKPIFVSRVPFRKISGKLFKETIYSERAFKDGYFVSKKSLVDLKRGDLDNFYNYECDKKLYDAISERMKEFNYNGKKAFESPFRKPTKSGKEGPVVRSVKIKSAAPFKDGIPMNEGLVAKEGMVRIDIYEKEGKYFVVPVYRYQLAKGIVPKRAAIAGKSELKWPIMDQTYNFKFSIFKNDLIEIKYAKKDGYFGYYDGFDRHTASLVIENHDNSDRYRGIGVKTGVVEFNKYEVDVLGNYHKVNLGGN

SEQ ID NO: 401 - protein, 1099 aa, Corynebacterium accolens
MSLSYRVGIDVGTYSLGCTAIEVDDNDQPVNILSSVSLIHDSGLDPDQQKRAVTRLASSGVARRTRRLYRRRRRRMINLEKFLTSQGWETRPFEHYSDPYLPWNARVALVNGYISDDAQRGMYLSIAFRHIANHRGWRNPYWKVSSLYSPDKPSDAFEQIRKELEESTGHKIPETVTVGQLISFAQFGKDRLRGGGKKKDEKKPQEQVNQAVISARLHQIDHAREINEICRVQKIDDALRKQILDLVFAAESPKGAQIGRVGKDPLQPKLPRALKASDAFQQYRIVALAGNLRIYRDGVSTPLDRDEKLIVFNYLINLSHKEEPSWLKVAEVLNIDRGQLHGTATMTDDGERAGAAPPVHDTNRTILGCKIKPLVHWWEGANDDERAAMLKALSNSEVEDFDSPAGAQTQAFFANLDESEQEKLDSLHLPIGRAAYSEDTLMRLTSRMLDENLDLYEARLAEFDIPKDWAPPAPRIGEPVGNPAVDRVLKGVARWLEAAADEWGAPKSVVIEHVRDGFISKSKANEIDRANNARHKRNRELFKQMQENLGIDGKLRSSDLWRYQSVQRQNCQCAYCGSPITYTTCEMDHIVPRAGEGSTNTRDNLVATCHRCNLAKKNIPFAVWAAQTNIPGVSVKEALDRTRHWSEDSGMTSKDFKKFRKNVCDRLKRTVVDEPLDARSMESVAWMANELRGRVAQRFQEENTVVNVYRGELTAEARRAAGISDKLRFIDGTGKSRLDRRHHAVDAAVVAFTQNYVAETLAIRSNKKREAQLLQAAEQWKEFTGSDAEHRAAWNAWLPKMQKLAVLLQKALDEDRIAVTSNLRLRLGNGRAHEDSIGELKTIRVGDAISVTDIDRASSEALWCALTREPDFDENNGLPENPDRRIRIHGTWYDAEDDIEVFPVGAGAIKVRGGYAELSRFHHARIYKIPGKKAPVYCMLRVYNADLIRHRHEDLFSVEIKPQTMSVRQAEPKLRKALAENTAEYLGWLVTDDELVIDTSNFNTGQIAEMQSELGQVRRWRLDGFYSPSTLRLRPLQMSAEGLREDTSIGAKKIIDRPGWLPAINKLFGEGHVTVVRRDALGRARLTSNAHLPISWKAE

SEQ ID NO: 402 - protein, 1084 aa, Corynebacterium diphtheriae
MKYHVGIDVGTFSVGLAAIEVDDAGMPIKTLSLVSHIHDSGLDPDEIKSAVTRLASSGIARRTRRLYRRKRRRLQQLDKFIQRQGWPVIELEDYSDPLYPWKVRAELAASYIADEKERGEKLSVALRHIARHRGWRNPYAKVSSLYLPDGPSDAFKAIREEIKRASGQPVPETATVGQMVTLCELGTLKLRGEGGVLSARLQQSDHAREIQEICRMQEIGQELYRKIIDVVFAAESPKGSASSRVGKDPLQPGKNRALKASDAFQRYRIAALIGNLRVWVDGEKRILSVEEKNLVFDHLVNLTPKKEPEWVTIAEILGIDRGQLIGTATMTDDGERAGARPPTHDTNRSIVNSRIAPLVDWWKTASALEQHAMVKALSNAEVDDFDSPERAKVQAFFADLDDDVHAKLDSLHLPVGRAAYSEDTLVRLTRRMLSDGVDLYTARLQEFGIEPSWTPPTPRIGEPVGNPAVDRVLKTVSRWLESATKTWGAPERVIIEHVREGFVTEKRAREMDGDMRRRAARNAKLFQEMQEKLNVQGKPSRADLWRYQSVQRQNCQCAYCGSPITFSNSEMDHIVPRAGQGSTNTRENLVAVCHRCNQSKGNTPFAIWAKNTSIEGVSVKEAVERTRHWVTDTGMRSTDFKKFTKAVVERFQRATMDEEIDARSMESVAWMANELRSRVAQHFASHGTTVRVYRGSLTAEARRASGISGKLEFLDGVGKSRLDRRHHAIDAAVIAFTSDYVAETLAVRSNLKQSQAHRQEAPQWREFTGKDAEHRATWRVWCQKMEKLSALLTEDLRDDRVVVMSNVRLRLGNGSAHEETIGKLSKVKLGSQLSVSDIDKASSEALWCALTREPDFDPKDGLPANPERHIRVNGTHVYAGDNIGLFPVSAGSIALRGGYAELGSSFHHARVYKITSGKKPAFAMLRVYTIDLLPYRNQDLFSVELKPQTMSMRQAEKKLRDALATGNAEYLGWLVVDDELVVDTSKIATDQVKAVEAELGTIRRWRVDGFFGDTRLRLRPLQMSKEGIKKESAPELSKIIDRPGWLPAVNKLFSEGNVTVVRRDSLGRVRLESTAHLPVTWKVQ

SEQ ID NO: 403 - protein, 1084 aa, Corynebacterium diphtheriae
MKYHVGIDVGTFSVGLAAIEVDDAGMPIKTLSLVSHIHDSGLDPDEIKSAVTRLASSGIARRTRRLYRRKRRRLQQLDKFIQRQGWPVIELEDYSDPLYPWKVRAELAASYIADEKERGEKLSVALRHIARHRGWRNPYAKVSSLYLPDGPSDAFKAIREEIKRASGQPVPETATVGQMVTLCELGTLKLRGEGGVLSARLQQSDHAREIQEICRMQEIGQELYRKIIDVVFAAESPKGSASSRVGKDPLQPGKNRALKASDAFQRYRIAALIGNLRVRVDGEKRILSVEEKNLVFDHLVNLAPKKEPEWVTIAEILGIDRGQLIGTATMTDDGERAGARPPTHDTNRSIVNSRIAPLVDWWKTASALEQHAMVKALSNAEVDDFDSPEGAKVQAFFADLDDDVHAKLDSLHLPVGRAAYSEDTLVRLTRRMLADGVDLYTARLQEFGIEPSWTPPAPRIGEPVGNPAVDRVLKTVSRWLESATKTWGAPERVIIEHVREGFVTEKRAREMDGDMQRRAARNAKLFQEMQEKLNVQGKPSRADLWRYQSVQRQNCQCAYCGSPITFSNSEMDHIVPRAGQGSTNTRENLVAVCHRCNQSKGNTPFAIWAKNTSIEGVSVKEAVERTRHWVTDTGMRSPDFKKFTKAVVERFQRATMDEEIDARSMESVAWMANELRSRVAQHFASHGTTVRVYRGSLTAEARRASGISGKLKFFDGVGKSRLDRRHHAIDAAVIAFTSDYVAETLAVRSNLKQSQAHRQEAPQWREFTGKDAEHRAAWRVWCQKMEKLSALLTEDLRDDRVVVMSNVRLRLGNGSAHKETIGKLSKVKLGSQLSVSDIDKASSEALWCALTREPDFDPKEGLPANPERHIRVNGTHVYAGDNIGLFPVSAGSIALRGGYAELGSSFHHARVYKITSGKKPAFAMLRVYTIDLLPYRNQDLFSVELKPQTMSMRQAEKKLRDALATGNAEYLGWLVVDDELVVDTSKIATDQVKAVEAELGTIRRWRVDGFFSPSKLRLRPLQMSKEGIKKESAPELSKIIDRPGWLPAVNKLFSDGNVTVVRRDSLGRVRLESTAHLPVTWKVQ

SEQ ID NO: 404 - protein, 1084 aa, Corynebacterium diphtheriae
MKYHVGIDVGTFSVGLAAIEVDDAGMPIKTLSLVSHIHDSGLDPDKIKSAVTRLASSGIARRTRRLYRRKRRRLQQLDKFIQRQGWPVIELEDYSDPLYPWKVRAELAASYIADEKERGEKLSVALRHIARHRGWRNPYAKVSSLYLPDEPSDAFKAIREEIKRASGQPVPETATVGQMVTLCELGTLKLRGEGGVLSARLQQSDHAREIQEICRMQEIGQELYRKIIDVVFAAESPKGSASSRVGKDPLQPGKNRALKASDAFQRYRIAALIGNLRVRVDGEKRILSVEEKNLVFDHLVNLAPKKEPEWVTIAEILGIDRGQLIGTATMTDDGERAGARPPTHDTNRSIVNSRIAPLVDWWKTASALEQHAMVKALSNAEVDDFDSPEGAKVQAFFADLDDDVHAKLDSLHLPVGRAAYSEDTLVRLTRRMLADGVDLYTARLQEFGIEPSWTPPAPRIGEPVGNPAVDRVLKTVSRWLKSATKTWGAPERVIIEHVREGFVTEKRAREMDGDMRRRAARNAKLFQEMQEKLNVQGKPSRADLWRYQSVQRQNCQCAYCGSPITFSNSEMDHIVPRAGQGSTNTRENLVAVCHRCNQSKGNTPFAIWAKNTSIEGVSVKEAVERTRHWVTDTGMRSTDFKKFTKAVVERFQRATMDEEIDARSMESVAWMANELRSRVAQHFASHGTTVRVYRGSLTAEARRASGISGKLEFLDGVGKSRLDRRHHAIDAAVIAFTSDYVAETLAVRSNLKQSQAHRQEAPQWREFTGKDAEHRAAWRVWCQKMEKLSALLTEDLRDDRVVVMSNVRLRLGNGSAHEETIGKLSKVKLGSQLSVSDIDKASSEALWCALTREPDFDPKDGLPANPERHIRVNGTHVYAGDNIGLFPVSAGSIALRGGYAELGSSFHHARVYKITSGKKPAFAMLRVYTIDLLPYRNQDLFSVELKPQTMSMRQAEKKLRDALATGNAEYLGWLVVDDELVVDTSKIATDQVKAVEAELGTIRRWRVDGFFGDTRLRLRPLQMSKEGIKKESAPELSKIIDRPGWLPAVNKLFSEGNVTVVRRDSLGRVRLESTAHLPVTWKVQ

SEQ ID NO: 405 - protein, 1084 aa, Corynebacterium diphtheriae
MKYHVGIDVGTFSVGLAAIEVDDAGMPIKTLSLVSHIHDSGLDPDKIKSAVTRLASSGIARRTRRLYRRKRRRLQQLDKFIQRQGWPVIELEDYSDPLYPWKVRAELAASYIADEKERGEKLSVALRHIARHRGWRNPYAKVSSLYLPDEPSDAFKAIREEIKRASGQPVPETATVGQMVTLCELGTLKLRGEGGVLSARLQQSDHAREIQEICRMQEIGQELYRKIIDVVFAAESPKGSASSRVGKDPLQPGKNRALKASDAFQRYRIAALIGNLRVRVDGEKRILSVEEKNLVFDHLVNLAPKKEPEWVTIAEILGIDRGQLIGTATMTDDGERAGARPPTHDTNRSIVNSRIAPLVDWWKTASALEQHAMVKALSNAEVDDFDSPEGAKVQAFFADLDDDVHAKLDSLHLPVGRAAYSEDTLVRLTRRMLADGVDLYTARLQEFGIEPSWTPPAPRIGEPVGNPAVDRVLKTVSRWLESATKTWGAPERVIIEHVREGFVTEKRAREMDGDMRRRAARNAKLFQEMQEKLNVQGKPSRADLWRYQSVQRQNCQCAYCGSPITFSNSEMDHIVPRAGQGSTNTRENLVAVCHRCNQSKGNTPFAIWAKNTSIEGVSVKEAVERTRHWVTDTGMRSTDFKKFTKAVVERFQRATMDEEIDARSMESVAWMANELRSRVAQHFASHGTTVRVYRGSLTAEARRASGISGKLEFLDGVGKSRLDRRHHAIDAAVIAFTSDYVAETLAVRSNLKQSQAHRQEAPQWREFTGKDAEHRAAWRVWCQKMEKLSALLTEDLRDDRVVVMSNVRLRLGNGSAHEETIGKLSKVKLGSQLSVSDIDKASSEALWCALTREPDFDPKDGLPANPERHIRVNGTHVYAGDNIGLFPVSAGSIALRGGYAELGSSFHHARVYKITSGKKPAFAMLRVYTIDLLPYRNQDLFSVELKPQTMSMRQAEKKLRDALATGNAEYLGWLVVDDELVVDTSKIATDQVKAVEAELGTIRRWRVDGFFGDTRLRLRPLQMSKEGIKKESAPELSKIIDRPGWLPAVNKLFSEGNVTVVRRDSLGRVRLESTAHLPVTWKVQ

SEQ ID NO: 406 - protein, 1084 aa, Corynebacterium diphtheriae
MKYHVGIDVGTFSVGLAAIEVDDAGMPIKTLSLVSHIHDSGLDPDKMKSAVTRLASSGIARRTRRLYRRKRRRLQQLDKFIQRQGWPVIELEDYSDPLYPWKVRAELAASYIADEKERGEKLSVALRHIARHRGWRNPYAKVSSLYLPDEPSDAFKSIREEIKRASGQPVPETATVGQMVTLCELGTLKLRGEGGVLSARLQQSDHAREIQEICRMQEIGQELYRKIIDVVFAAESPKGSASSRVGKDPLQPGKNRALKASDSFQRYRIAALISNLRVRVDGEKRILSVEEKNLVFDHLVNLAPKKEPEWVTIAEILGIDRGQLIGTATMTDDGERAGARPPTHDTNRSIVNSRIAPLVDWWKTASALEQHAMVKALSNAEVDDFDSPEGAKVQAFFADLDDDVHAKLDSLHLPVGRAAYSEDTLVRLTRRMLADGVDLYTARLQEFGIEPSWTPPAPRIGEPVGNPAVDRVLKTVSRWLESATKTWGAPERVIIEHVRDGFVTEKRAREMDGDMRRRAARNAKLFQEMQEKLNVQGKPSRADLWRYQSVQRQNCQCAYCGSPITFSNSEMDHIVPRAGQGSTNTRENLVAVCHRCNQSKGNTPFAIWAKNTSIEGVSVKEAVERTRHWVTDTGMRSTDFKKFTKAVVERFQRATMDEEIDARSMESVAWMANELRSRVAQHFASHGTTVRVYRGSLTAEARRASGISGKLEFLDGVGKSRLDRRHHAIDAAVIAFTSDYVAETLAVRSNLKQSQAHRQEAPQWREFTGKDAEHRAAWRVWCQKMEKLSALLTEDLRDDRVVVMSNVRLRLGNGSAHEETIGKLSKVKLGSQLSVSDIDKASSEALWCALTREPDFDPKDGLPANPERHIRVNGTHVYAGDNIGLFPVSAGSIALRGGYAELGSSFHHARVYKITSGKKPAFAMLRVYTIDLLPYRNQDLFSVELKPQTMSMRQAEKKLRDALATGNAEYLGWLVVDDELVVDTSKIATDQVKAVEAELGTIRRWRVDGFFGDTRLRLRPLQMSKEGIKKELAPELSKIIDRPGWLPAVNKLFSEGNVTVVRRDSLGRVRLESTAHLPVTWKVQ

SEQ ID NO: 407 - protein, 1084 aa, Corynebacterium diphtheriae
MKYHVGIDVGTFSVGLAAIEVDDAGMPIKTLSLVSHIHDSGLDPDKMKSAVTRLASSGIARRTRRLYRRKRRRLQQLDKFIQRQGWPVIELEDYSDPLYPWKVRAELAASYIADEKERGEKLSVALRHIARHRGWRNPYAKVSSLYLPDEPSDAFKSIREEIKRASGQPVPETATVGQMVTLCELGTLKLRGEGGVLSARLQQSDHAREIQEICRMQEIGQELYRKIIDVVFAAESPKGSASSRVGKDPLQPGKNRALKASDAFQRYRIAALIGNLRVRVDGEKRILSVEEKNLVFDHLVNLAPKKEPEWVTIAEILGIDRGQLIGTATMTDDGERAGARPPTHDTNRSIVNSRIAPLVDWWKTASALEQHAMVKALSNAEVDDFDSPEGAKVQAFFADLDDDVHAKLDSLHLPVGRAAYSEDTLVRLTRRMLADGVDLYTARLQEFGIEPSWTPPAPRIGEPVGNPAVDRVLKTVSRWLESATKTWGAPERVIIEHVREGFVTEKRAREMDGDMRRRAARNAKLFQEMQEKLNVQGKPSRADLWRYQSVQRQNCQCAYCGSPITFSNSEMDHIVPRAGQGSTNTRENLVAVCHRCNQSKGNTPFAIWAKNTSIEGVSVKEAVERTRHWVTDTGMRSTDFKKFTKAVVERFQRATMDEEIDARSMESVAWMANELRSRVAQHFASHGTTVRVYRGSLTAEARRASGISGKLEFLDGVGKSRLDRRHHAIDAAVIAFTSDYVAETLAVRSNLKQSQAHRQEAPQWREFTGKDAEHRAAWRVWCQKMEKLSALLTEDLRDDRVVVMSNVRLRLGNGSAHEETIGKLSKVKLGSQLSVSDIDKASSEALWCALTREPDFDPKDGLPANPERHIRVNGTHVYAGDNIGLFPVSAGSIALRGGYAELGSSFHHARVYKITSGKKPAFAMLRVYTIDLLPYRNQDLFSVELKPQTMSMRQAEKKLRDALATGNAEYLGWLVVDDELVVDTSKIATDQVKAVEAELGTIRRWRVDGFFGDTRLRLRPLQMSKEGIKKESAPELSKIIDRPGWLPAVNKLFSEGNVTVVRRDSLGRVRLESTAHLPVTWKVQ

SEQ ID NO: 408 - protein, 1084 aa, Corynebacterium diphtheriae
MKYHVGIDVGTFSVGLAAIEVDDAGMPIKTLSLVSHIHDSRLDPDKIKSAVTRLASSGIARRTRRLYRRKRRRLQQLDKFIQRQGWPVIELEDYSDPLYPWKVRAELAASYIADEKERGEKLSVALRHIARHRGWRNPYAKVSSLYLPDEPSDAFKAIREEIKRASGQPVPETATVGQMVTLCELGTLKLRGEGGVLSARLQQSDHAREIQEICRMQEIGQELYRKIIDVVFAAESPKGSASSRVGKDPLQPGKNRALKASDAFQRYRIAALIGNLRVRVDGEKRILSVEEKNLVFDHLVNLAPKKEPEWVTIAEILGIDRGQLIGTATMTDDGERAGARPPTHDTNRSIVNSRIAPLVDWWKTASALEQHAMVKALSNAEVDDFDSPEGAKVQAFFADLDDDVHAKLDSLHLPVGRAAYSEDTLVRLTRRMLADGVDLYTARLQEFGIEPSWTPPAPRIGEPVGNPAVDRVLKTVSRWLESATKTWGAPERVIIEHVREGFVTEKRAREMDGDMRRRAARNAKLFQEMQEKLNIQGKPSRADLWRYQSVQRQNCQCAYCGSPITFSNSEMDHIVPRAGQGSTNTRENLVAVCHRCNQSKGNTPFAIWAKNTSIEGVSVKEAVERTRHWVTDTGMRSTDFKKFTKAVVERFQRVTMDEEIDARSMESVAWMANELRSRVAQHFASRGTTVRVYRGSLTAEARRASGISGKLEFLDGVGKSRLDRRHHAIDAAVIAFTSDYVAETLAVRSNLKQSQAHRQEAPQWREFTGKDAEHRAAWRVWCQKMEKLSALLTEDLRDDRVVVMSNVRLRLGNGSAHEETIGKLSKVKLGSQLSVSDIDKASSEALWCALTREPDFDPKDGLPANPERHIRVNGTHVYAGDNIGLFPVSAGSIALRGGYAELGSSFHHARVYKITSGKKPAFAMLRVYTIDLLPYRNQDLFSVELKPQTMSMRQAEKKLRDALATGNAEYLGWLVVDDELVVDTSKIATDQVKAVEAELGTIRRWRVDGFFGDTRLRLRPLQMSKEGIKKESAPELSKIIDRPGWLPAVNKLFSEGNVTVVRRDSLGRVRLESTAHLPVTWKVQ

SEQ ID NO: 409 - protein, 1069 aa, Corynebacterium matruchotii
MAAIAIDDDGKPTEILSAISLIHDSGVDPDSAKSAATRLATSGIARRTRRLYRRKRKRLAKLDKFISSQGWPLKEFEKYEDPFYPWRVRAELATTAITDQQELGEKLSIALRHIARHRGWRNPYSKVTALYTVTEPSDAFLAMQEECAKQLGRTIPETITVGQLVTGMNLGKTRLRGENSLLAARPRQSDNANEIHTIAKVQGLSNELVRQIIDHVFAAESPKGSAAEQVGKDPLQPTKKRALKASDAFQQYRIAALIGNLRIRGGKGNRRLTTEETRLVFDYLRSLPAKQEPTWQLVAEQLKIDRGNLVGTAIMTDDGERAGAKPPVHDTNRIMENTKIKPLATWWKSADADARAAMVKALSNAEVDDFDSQAGAQVQEFFFGISDEDQEKLDGLHLPIGRAAYSEDTLDRLTKRMIGEGMDLYEARQAEFKISNDWAPPAPEIGERVGNPAVDRVLKATARWLNAAERQWGAPKSVNIEHVRAAFMSESSARELDRDNQQRAKRNVKVVAEMQEKLGIEGRPSRADVWRFQSIQRQNGKCAYCGAEISFKNSEMDHIIPQVGEGSTNTRDNLVAVCRECNSSKSNIAFAVWAENTSRPGVSVQKAIERTHHWVTDSGLRKPEFDKFRKQVCDRLRRKATDEPIDARSLESVAWMANELRSRIAQKFKDGDTKVRVYKGALTAEARRASGISGKLEFVDGKGKSRLDRRHHAVDAAVVAFTSNYVAETLALRSNMKFDQELRRKAPQWREFTGSDHVHQVEWTKWKYRMQALAELLNNALVQDRIVVMHNLRLRLGNGAAHEDTIGKLTRLKVGDAISTTDIDRASSEALWCALTRDPDYDPKTGLPENPNRTIRIHGTHLTASDEITVFPVAAASIPIRDGFAKLGSNYHHVRLFRVPSGKKYKYCLMQVYTVDLLKFRKEDLFTVELKPQTISVRTCEALLRKALANGTAEYLGWLVSDDELLIDTSSFDTPGIVKLREEYGPVNRWRLAGLTSVTRLNLRPLYLSKEGLKPNVNPEIKKIIDNRSWIITVNKLFSSGHVKIIRRDALGRPRLHSAAHLPICWEVK

SEQ ID NO: 410 - protein, 210 aa, Diplosphaera colitermitum
MSDILDKPIVLSLNRAWQVIGHRTVKQALVALNGGNADLPPALGLDIAYPKFDDGAWNFDRPLFLNPLPWSEWIELPVRDFDFAITTPRLRIRVPTVIVATQFAKMPVRIPRLTREAIFERDGGVCQYTGEHVGKHGGNLDHVVPRDRGGRDSFENLVWAKREINSLKANRLPHEAGLRLLRRPKAPAPLPASMTIREARHPDWRHFLTP

SEQ ID NO: 411 - protein, 1332 aa, Dolosigranulum pigrum
MQKNYTIGLDIGTNSVGWAVMKDDYTLIRKRMKVLGNTDIKKIKKNFWGVRLFDEGETAKETRLKRGTRRRYQRRRNRLIYLQDIFQQPMLAIDENFFHRLDDSFFVPDDKSYDRHPIFGSLEEEVAYHNTYPTIYHLRKHLADNPEKADLRLVYTALAHIVKYRGHFLIEGELNTENTSISETFEQFLDTYSDIFKEQLVGDISKVEEILSSKQSRSRKHEQIMALFPNENKLGNFGRFMMLIVGNTSNFKPVFDLDDEYKLKLSDETYEEDLDTLLGMTDDVFLDVFMAAKNVYDAVEMSAIISTDTGNSKAVLSNQMINFYDEHKVDLAQLKQFFKTHLPDKYYECFSDPSKNGYAGYIDGKTNQEDFYKYIEKVMKTIKSDKKDYFLDKIDREVFLRKQRSFYNSVIPHQIHLQEMQAILDRQSQYYPFLAENRDKIESLVTFRIPYYVGPLTVSDQSEFAWMERQSDEPIRPWNFDEIVNKERSAEKFIERMTNMDTYLLEEKVLPKRSLLYQTFEVYNELTKVRYTNEQGKTEKLNRQQKAEIIETLFKQKNRVREKDIANYLEQYGYVDGTDIKGVEDKFNASLSTYNDLAKIDGAKAYLDDPEYADVWEDIIKILTIFEDKAMRKKQLQTYSDTLSPEILKKLERKHYTGWGRFSKKLINGLRDEGSNKTILDYLKSDEGSSGPTNRNFMQLIRDNTLSFKKKIEDAQTIEDTTHIYDTVAELPGSPAIKKGIRQALKIVEEIIDIIGYEPENIVVEMARESQTTKKGKDLSKERLEKLTEAIKEFDGPSDVKVKDLKNENLRNDRLYLYYLQNGRDMYTNEPLDINNLSKYDIDHIIPQSFTTDNSIDNKVLVSRTKNQGNKSDDVPSINIVHKMKPFWRQLHKAGLISDRKFKNLTKAEHGGLTEADRAHFLNRQLVETRQITKHVANLLDSQYNTAEEQRINIVLLKSSMTSRFRKEFKLYKVREINDYHHGHDAYLNAVVATTIMKVYPNLKPQFVYGQYKKTSMFKEEKATARKHFYSNITKFFKKEKVVNEETGEILWDTERHLSTIKRVLSWKQMNIVKKVEKQKGQLWKETIYPKGDSSKLIPVKEGMDPQKYGGLSQVSEAFAVVITHEKGKKKQLKSDLISIPIVDQKAYEQHPTAYLEEAGYNNPTVLHELFKYQLFELEDGSRRMIASAKEFQKGNQMVLPLELVELLYHANRYDKVKFPDSIEYVHDNLAKFDDLLEYVIDFSNKYINADKNVQKIQKIYKEHGTEDVELTVESFVNLMTFTAMGAPATFKFYGESITRSRYTSITEFRGSTLIFQSITGLYETRYKLEDN

SEQ ID NO: 412 - protein, 921 aa, Enterococcus faecalis
MIPHQIHLAELQAIIHRQAAYYPFLKENQEKIEQLVTFRIPYYVGPLSKGDASTFAWLKRQSEEPIRPWNLQETVDLDQSATAFIERMTNFDTYLPSEKVLPKHSLLYEKFMVFNELTKISYTDDRGIKANFSGKEKEKIFDYLFKTRRKVKKKDIIQFYRNEYNTEIVTLSGLEEDQFNASFSTYQDLLKCGLTRAELDHPDNAEKLEDIIKILTIFEDRQRIRTQLSTFKGQFSAEVLKKLERKHYTGWGRLSKKLINGIYDKESGKTILGYLIKDDGVSKHYNRNFMQLINDSQLSFKNAIQKAQSSEHEETLSETVNELAGSPAIKKGIYQSLKIVDELVAIMGYAPKRIVVEMARENQTTSTGKRRSIQRLKIVEKAMAEIGSNLLKEQPTTNEQLRDTRLFLYYMQNGKDMYTGDELSLHRLSHYDIDHIIPQSFMKDDSLDNLVLVGSTENRGKSDDVPSKEVVKDMKAYWEKLYAAGLISQRKFQRLTKGEQGGLTLEDKAHFIQRQLVETRQITKNVAGILDQRYNANSKEKKVQIITLKASLTSQFRSIFGLYKVREVNDYHHGQDAYLNCVVATTLLKVYPNLAPEFVYGEYPKFQTFKENKATAKAIIYTNLLRFFTEDEPRFTKDGEILWSNSYLKTIKKELNYHQMNIVKKVEVQKGGFSKESIKPKGPSNKLIPVKNGLDPQKYGGFDSPIVAYTVLFTHEKGKKPLIKQEILGITIMEKTRFEQNRILFLEEKGFLRPRVLMKLPKYTLYEFPEGRRRLLASAKEAQKGNQMVLPEHLLTLLYHAKQCLLPNQSESLTYVEQHQPEFQEILERVVDFAEVHTLAKSKVQQIVKLFEANQTADVKEIAASFIQLMQFNAMGAPSTFKFFQKDIERARYTSIKEIFDATIIYQSTTGLYETRRKVVD

SEQ ID NO: 413 - protein, 1337 aa, Enterococcus faecalis; identical to SEQ ID NO: 125

SEQ ID NO: 414 - protein, 1337 aa, Enterococcus faecalis
MKKDYVIGLDIGTNSVGWAVMTEDYQLVKKKMPIYGNTEKKKIKKNFWGVRLFEEGHTAEDRRLKRTARRRISRRRNRLRYLQAFFEEAMTALDENFFARLQESFLVPEDKKWHRHPIFAKLEDEVAYHETYPTIYHLRKKLADSSEQADLRLIYLALAHIVKYRGHFLIEGKLSTENISVKEQFQQFMIIYNQTFVNGESRLVSAPLPESVLIEEELTEKASRTKKSEKVLQQFPQEKANGLFGQFLKLMVGNKADFKKVFGLEEEAKITYASESYEEDLEGILAKVGDEYSDVFLAAKNVYDAVELSTILADSDKKSHAKLSSSMIVRFTEHQEDLKNFKRFIRENCPDEYDNLFKNEQKDGYAGYITHAGKVSQLKFYQYVKKIIQDIAGAEYFLEKIAQENFLRKQRTFDNGVIPHQIHLAELQAIIHRQAAYYPFLKENQEKIEQLVTFRIPYYVGPLSKGDANTFAWLKRQSEEPIRPWNLQETVDLDQSATAFIERMTNFDTYLPSEKVLPKHSLLYEKFMVFNELTKISYTDDRGIKANFSGKEKEKIFDYLFKTRRKVKKKDIIQFYRNEYNTEIVTLSGLEEDQFNASFSTYQDLLKCGLTRAELDHPDNAEKLEDIIKILTIFEDRQRIRTQLSTFKGQFSAEVLKKLERKHYTGWGRLSKKLINGIYDKESGKTILDYLIKDDGVSKHYNRNFMQLINDSQLSFKNAIQKAQSSEHEETLSETVNELAGSPAIKKGIYQSLKIVDELVAIMGYAPKRIVVEMARENQTTSTGKRRSIQRLKIVEKAMAEIGSNLLKEQPTTNEQLRDTRLFLYYMQNGKDMYTGDELSLHRLSHYDIDHIIPQSFMKDDSLDNLVLVGSTENRGKSDDVPSKEVVKDMKAYWEKLYAAGLISQRKFQRLTKGEQGGLTLEDKAHFIQRQLVETRQITKNVAGILDQRYNAKSKEKKVQIITLKASLTSQFRSIFGLYKVREVNDYHHGQDAYLNCVVATTLLKVYPNLAPEFVYGEYPKFQTFKENKATAKAIIYTNLLRFFTEDEPRFTKDGEILWSNSYLKTIKKELNYHQMNIVKKVEVQKGGFSKESIKPKGPSNKLIPVKNGLDPQKYGGFDSPIVAYTVLFTHEKGKKPLIKQEILGITIMEKTRFEQNPILFLEEKGFLRPRVLMKLPKYTLYQFPEGRRRLLASAKEAQKGNQMVLPEHLLTLLYHAKQCLLPNQSESLAYVEQHQPEFQEILERVVDFAEVHTLAKSKVQQIVKLFEANQTADVKEIAASFIQLMQFNAMGAPSTFKFFQKDIERARYTSIKEIFDATIIYQSTTGLYETRRKVVD

SEQ ID NO: 415 - protein, 1337 aa, Enterococcus faecalis
MKKDYVIGLDIGTNSVGWAVMTEDYQLVKKKMPIYGNTEKKKIKKNFWGVRLFEEGHTAEDRRLKRTARRRISRRRNRLRYLQAFFEEAMTALDENFFARLQESFLVPEDKKWHRHPIFAKLEDEVAYHETYPTIYHLRKKLADSSEQADLRLIYLALAHIVKYRGHFLIEGKLSTENISVKEQFQQFMIIYNQTFVNGESRLVSTPLPESVLIEEELTEKASRTKKSEKVLQQFPQEKANGLFGQFLKLMVGNKADFKKVFGLEEEAKITYASESYEEDLEGILAKVGDEYSDVFLAAKNVYDAVELSTILADSDKKSHAKLSSSMIVRFTEHQEDLKNFKRFIRENCPDEYDNLFKNEQKDGYAGYITHAGKVSQLKFYQYVKKIIQDIAGAEYFLEKIAQENFLRKQRTFDNGVIPHQIHLAELQAIIHRQAAYYPFLKENQEKIEQLVTFRIPYYVGPLSKGDASTFAWLKRQSEEPIRPWNLQETVDLDQSATAFIERMTNFDTYLPSEKVLPKHSLLYEKFMVFNELTKISYTDDRGIKANFSGKEKEKIFDYLFKTRRKVKKKDIIQFYRNEYNTEIVTLSGLEEDQFNASFSTYQDLLKCGLTRAELDHPDNAEKLEDIIKILTIFEDRQRIRTQLSTFKGQFSAEVLKKLERKHYTGWGRLSKKLINGIYDKESGKTILDYLVKDDGVSKHYNRNFMQLINDSQLSFKNAIQKAQSSEHEETLSETVNELAGSPAIKKGIYQSLKIVDELVAIMGYAPKRIVVEMARENQTTSTGKRRSIQRLKIVEKAMAEIGSNLLKEQPTTNEQLRDTRLFLYYMQNGKDMYTGDELSLHRLSHYDIDHIIPQSFMKDDSLDNLVLVGSTENRGKSDDVPSKEVVKDMKAYWEKLYAAGLISQRKFQRLTKGEQGGLTLEDKAHFIQRQLVETRQITKNVAGILDQRYNAKSKEKKVQIITLKASLTSQFRSIFGLYKVREVNDYHHGQDAYLNCVVATTLLKVYPNLAPEFVYGEYPKFQTFKENKATAKAIIYTNLLRFFTEDEPRFTKDGEILWSNSYLKTIKKELNYHQMNIVKKVEVQKGGFSKESIKPKGPSNKLIPVKNGLDPQKYGGFDSPIVAYTVLFTHEKGKKPLIKQEILGITIMEKTRFEQNPILFLEEKGFLRPRVLMKLPKYTLYEFPEGRRRLLASAKEAQKGNQMVLPEHLLTLLYHAKQCLLPNQSESLAYVEQHQPEFQEILERVVDFAEVHTLAKSKVQQIVKLFEANQTADVKEIAASFIQLMQFNAMGAPSTFKFFQKDIERARYTSIKEIFDATIIYQSTTGLYETRRKVVD

SEQ ID NO: 416 - protein, 1337 aa, Enterococcus faecalis
MKKDYVIGLDIGTNSVGWAVMTEDYQLVKKKMPIYGNTEKKKIKKNFWGVRLFEEGHTAEDRRLKRTARRRISRRRNRLRYLQAFFEEAMTDLDENFFARLQESFLVPEDKKWHRHPIFAKLEDEVAYHETYPTIYHLRKKLADSSEQADLRLIYLALAHIVKYRGHFLIEGKLSTENISVKEQFQQFMIIYNQTFVNGESRLVSAPLPESVLIEEELTEKASRTKKSEKVLQQFPQEKANGLFGQFLKLMVGNKADFKKVFGLEEEAKITYASESYEEDLEGILAKVGDEYSDVFLAAKNVYDAVELSTILADSDKKSHAKLSSSMIVRFTEHQEDLKKFKRFIRENCPDEYDNLFKNEQKDGYAGYIAHAGKVSQLKFYQYVKKIIQDIAGAEYFLEKIAQENFLRKQRTFDNGVIPHQIHLAELQAIIHRQAAYYPFLKENQEKIEQLVTFRIPYYVGPLSKGDASTFAWLKRQSEEPIRPWNLQETVDLDQSATAFIERMTNFDTYLPSEKVLPKHSLLYEKFMVFNELTKISYTDDRGIKANFSGKEKEKIFDYLFKTRRKVKKKDIIQFYRNEYNTEIVTLSGLEEDQFNASFSTYQDLLKCGLTRAELDHPDNAEKLEDIIKILTIFEDRQRIRTQLSTFKGQFSAEVLKKLERKHYTGWGRLSKKLINGIYDKESGKTILGYLIKDDGVSKHYNRNFMQLINDSQLSFKNAIQKAQSSEHEETLSETVNELAGSPAIKKGIYQSLKIVDELVAIMGYAPKRIVVEMARENQTTSTGKRRSIQRLKIVEKAMAEIGSNLLKEQPTTNEQLRDTRLFLYYMQNGKDMYTGDELSLHRLSHYDIDHIIPQSFMKDDSLDNLVLVGSTENRGKSDDVPSKEVVKDMKAYWEKLYAAGLISQRKFQRLTKGEQGGLTLEDKAHFIQRQLVETRQITKNVAGILDQRYNANSKEKKVQIITLKASLTSQFRSIFGLYKVREVNDYHHGQDAYLNCVVATTLLKVYPNLAPEFVYGEYPKFQTFKENKATAKAIIYTNLLRFFTEDEPRFTKDGEILWSNSYLKTIKKELNYHQMNIVKKVEVQKGGFSKESIKPKGPSNKLIPVKNGLDPQKYGGFDSPIVAYTVLFTHEKGKKPLIKQEILGITIMEKTRFEQNPILFLEEKGFLRPRVLMKLPKYTLYEFPEGRRRLLASAKEAQKGNQMVLPEHLLTLLYHAKQCLLPNQSESLAYVEQHQPEFQEILERVVDFAEVHTLAKSKVQQIVKLFEANQTADVKEIAASFIQLMQFNAMGAPSTFKFFQKDIERARYTSIKEIFDATIIYQSTTGLYETRRKVVD

SEQ ID NO: 417 - protein, 936 aa, Enterococcus faecalis
MKKDYVIGLDIGTNSVGWAVMTEDYQLVKKKMPIYGNTEKKKIKKNFWGVRLFEEGHTAEDRRLKRTARRRISRRRNRLRYLQAFFEEAMTDLDENFFARLQESFLVPEDKKWHRHPIFAKLEDEVAYHETYPTIYHLRKKLADSSEQADLRLIYLALAHIVKYRGHFLIEGKLSTENISVKEQFQQFMIIYNQTFVNGESRLVSAPLPESVLIEEELTEKASRTKKSEKVLQQFPQEKANGLFGQFLKLMVGNKADFKKVFGLEEEAKITYASESYEEDLEGILAKVGDEYSDVFLAAKNVYDAVELSTILADSDKKSHAKLSSSMIVRFTEHQEDLKKFKRFIRENCPDEYDNLFKNEQKDGYAGYIAHAGKVSQLKFYQYVKKIIQDIAGAEYFLEKIAQENFLRKQRTFDNGVIPHQIHLAELQAIIHRQAAYYPFLKENQEKIEQLVTFRIPYYVGPLSKGDASTFAWLKRQSEEPIRPWNLQETVDLDQSATAFIERMTNFDTYLPSEKVLPKHSLLYEKFMVFNELTKISYTDDRGIKANFSGKEKEKIFDYLFKTRRKVKKKDIIQFYRNEYNTEIVTLSGLEEDQFNASFSTYQDLLKCGLTRAELDHPDNAEKLEDIIKILTIFEDRQRIRTQLSTFKGQFSAEVLKKLERKHYTGWGRLSKKLINGIYDKESGKTILGYLIKDDGVSKHYNRNFMQLINDSQLSFKNAIQKAQSSEHEETLSETVNELAGSPAIKKGIYQSLKIVDELVAIMGYAPKRIVVEMARENQTTSTGKRRSIQRLKIVEKAMAEIGSNLLKEQPTTNEQLRDTRLFLYYMQNGKDMYTGDELSLHRLSHYDIDHIIPQSFMKDDSLDNLVLVGSTENRGKSDDVPSKEVVKDMKAYWEKLYAAGLISQRKFQRLTKGEQGGLTLEDKAHFIQRQLVETR

SEQ ID NO: 418 - protein, 1337 aa, Enterococcus faecalis
MKKDYVIGLDIGTNSVGWAVMTEDYQLVKKKMPIYGNTEKKKIKKNFWGVRLFEEGHTAEDRRLKRTARRRISRRRNRLRYLQAFFEEAMTDLDENFFARLQESFLVPEDKKWHRHPIFAKLEDEVAYHETYPTIYHLRKKLADSSEQADLRLIYLALAHIVKYRGHFLIEGKLSTENISVKEQFQQFMIIYNQTFVNGESRLVSAPLPESVLIEEELTEKASRTKKSEKVLQQFPQEKANGLFGQFLKLMVGNKADFKKVFGLEEEAKITYASESYEEDLEGILAKVGDEYSDVFLAAKNVYDAVELSTILADSDKKSHAKLSSSMIVRFTEHQEDLKKFKRFIRENCPDEYDNLFKNEQKDGYAGYIAHAGKVSQLKFYQYVKKIIQDIAGAEYFLEKIAQENFLRKQRTFDNGVIPHQIHLAELQAIIHRQAAYYPFLKENQEKIEQLVTFRIPYYVGPLSKGDASTFAWLKRQSEEPIRPWNLQETVDLDQSATAFIERMTNFDTYLPSEKVLPKHSLLYEKFMVFNELTKISYTDDRGIKANFSGKEKEKIFDYLFKTRRKVKKKDIIQFYRNEYNTEIVTLSGLEEDQFNASFSTYQDLLKCGLTRAELDHPDNAEKLEDIIKILTIFEDRQRIRTQLSTFKGQFSAEVLKKLERKHYTGWGRLSKKLINGIYDKESGKTILDYLVKDDGVSKHYNRNFMQLINDSQLSFKNAIQKAQSSEHEETLSETVNELAGSPAIKKGIYQSLKIVDELVAIMGYAPKRIVVEMARENQTTSTGKRRSIQRLKIVEKAMAEIGSNLLKEQPTTNEQLRDTRLFLYYMQNGKDMYTGDELSLHRLSHYDIDHIIPQSFMKDDSLDNLVLVGSTENRGKSDDVPSKEVVKDMKAYWEKLYAAGLISQRKFQRLTKGEQGGLTLEDKAHFIQRQLVETRQITKNVAGILNQRYNANSKEKKVQIITLKASLTSQFRSIFGLYKVREVNDYHHGQDAYLNCVVATTLLKVYPNLAPEFVYGEYPKFQTFKENKATAKAIIYTNLLRFFTEDEPRFTKDGEILWSNSYLKTIKKELNYHQMNIVKKVEVQKGGFSKESIKPKGPSNKLIPVKNGLDPQKYGGFDSPVVAYTVLFTHEKGKKPLIKQEILGITIMEKTRFEQNPILFLEEKGFLRPRVLMKLPKYTLYEFPEGRRRLLASAKEAQKGNQMVLPEHLLTLLYHAKQCLLPNQSESLAYVEQHQPEFQEILERVVDFAEVHTLAKSKVQQIVKLFEANQTADVKEIAASFIQLMQFNAMGAPSTFKFFQKDIERARYTSIKEIFDATIIYQSTTGLYETRRKVVD

SEQ ID NO: 419 - protein, 1337 aa, Enterococcus faecalis
MKKDYVIGLDIGTNSVGWAVMTEDYQLVKKKMPIYGNTEKKKIKKNFWGVRLFEEGHTAEDRRLKRTARRRISRRRNRLRYLQAFFEEAMTDLDENFFARLQESFLVPEDKKWHRHPIFAKLEDEVAYHETYPTIYHLRKKLADSSEQADLRLIYLALAHIVKYRGHFLIEGKLSTENISVKEQFQQFMIIYNQTFVNGESRLVSAPLPESVLIEEELTEKASRTKKSEKVLQQFPQEKANGLFGQFLKLMVGNKADFKKVFGLEEEAKITYASESYEEDLEGILAKVGDEYSDVFLAAKNVYDAVELSTILADSDKKSHAKLSSSMIVRFTEHQEDLKKFKRFIRENCPDEYDNLFKNEQKDGYAGYIAHAGKVSQLKFYQYVKKIIQDIAGAEYFLEKIAQENFLRKQRTFDNGVIPHQIHLAELQAIIHRQAAYYPFLKENQEKIEQLVTFRIPYYVGPLSKGDASTFAWLKRQSEEPIRPWNLQETVDLDQSATAFIERMTNFDTYLPSEKVLPKHSLLYEKFMVFNELTKISYTDDRGIKANFSGKEKEKIFDYLFKTRRKVKKKDIIQFYRNEYNTEIVTLSGLEEDQFNASFSTYQDLLKCGLTRAELDHPDNAEKLEDIIKILTIFEDRQRIRTQLSTFKGQFSAEVLKKLERKHYTGWGRLSKKLINGIYDKESGKTILGYLIKDDGVSKHYNRNFMQLINDSQLSFKNAIQKAQSSEHEETLSETVNELAGSPAIKKGIYQSLKIVDELVAIMGYAPKRIVVEMARENQTTSTGKRRSIQRLKIVEKAMAEIGSNLLKEQPTTNEQLRDTRLFLYYMQNGKDMYTGDELSLHRLSHYDIDHIIPQSFMKDDSLDNLVLVGSTENLGKSDDVPSKEVVKDMKAYWEKLYAAGLISQRKFQRLTKGEQGGLTLEDKAHFIQRQLVETRQITKNVAGILDQRYNANSKEKKVQIITLKASLTSQFRSIFGLYKVREVNDYHHGQDAYLNCVVATTLLKVYPNLAPEFVYGEYPKFQTFKENKATAKAIIYTNLLRFFTEDEPRFTKDGEILWSNSYLKTIKKELNYHQMNIVKKVEVQKGGFSKESIKPKGPSNKLIPVKNGLDPQKYGGFDSPIVAYTVLFTHEKGKKPLIKQEILGITIMEKTRFEQNPILFLEEKGFLRPRVLMKLPKYTLYEFPEGRRRLLASAKEAQKGNQMVLPEHLLTLLYHAKQCLLPNQSESLAYVEQHQPEFQEILERVVDFAEVHTLAKSKVQQIVKLFEANQTADVKEIAASFIQLMQFNAMGAPSTFKFFQKDIERARYTSIKEIFDATIIYQSTTGLYETRRKVVD

SEQ ID NO: 420 - protein, 1337 aa, Enterococcus faecalis
MKKDYVIGLDIGTNSVGWAVMTEDYQLVKKKMPIYGNTEKKKIKKNFWGVRLFEEGHTAEDRRLKRTARRRISRRRNRLRYLQAFFEEAMTDLDENFFARLQESFLVPEDKKWHRHPIFAKLEDEVAYHETYPTIYHLRKKLADSSEQADLRLIYLALAHIVKYRGHFLIEGKLSTENTSVKEQFQQFMVIYNQTFVNGESRLVSAPLPESVLIEEELTEKASRTKKSEKVLQQFPQEKANGLFGQFLKLMVGNKADFKKVFGLEEEAKITYASESYEEDLEGILAKVGDEYSDVFLAAKNVYDAVELSTILADSDKKSHAKLSSSMIVRFTEHQEDLKKFKRFIRENCPDEYDNLFKNEQKDGYAGYIAHAGKVSQLKFYQYVKKIIQDIAGAEYFLEKIAQENFLRKQRTFDNGVIPHQIHLAELQAIIHRQAAYYPFLKENQEKIEQLVTFRIPYYVGPLSKGDASTFAWLKRQSEEPIRPWNLQETVDLDQSATAFIERMTNFDTYLPSEKVLPKHSLLYEKFMVFNELTKISYTDDRGIKANFSGKEKEKIFDYLFKTRRKVKKKDIIQFYRNEYNTEIVTLSGLEEDQFNASFSTYQDLLKCGLTRAELDHPDNAEKLEDIIKILTIFEDRQRIRTQLSTFKGQFSAEVLKKLERKHYTGWGRLSKKLINGIYDKESGKTILDYLVKDDGVSKHYNRNFMQLINDSQLSFKNAIQKAQSSEHEETLSETVNELAGSPAIKKGIYQSLKIVDELVAIMGYAPKRIVVEMARENQTTSTGKRRSIQRLKIVEKAMAEIGSNLLKEQPTTNEQLRDTRLFLYYMQNGKDMYTGDELSLHRLSHYDIDHIIPQSFMKDDSLDNLVLVGSTENRGKSDDVPSKKVVKKMKAYWEKLYAAGLISQRKFQRLTKGEQGGLTLEDKAHFIQRQLVETRQITKNVAGILDQRYNAKSKEKKVQIITLKASLTSQFRSIFGLYKVREVNDYHHGQDAYLNCVVATTLLKVYPNLAPEFVYGEYPKFQAFKENKATAKTIIYTNLMRFFTEDEPRFTKDSEILWSNSYLKTIKKELNYHQMNIVKKVEVQKGGFSKESIKPKGPSNKLIPVKNGLDPQKYGGFDSPVVAYTVLFTHEKGKKPLIKQEILGITIMEKTRFEQNPILFLEEKGFLRPRVLMKLPKYTLYEFPEGRRRLLASAKEAQKGNQMVLPEHLLTLLYHAKQCLLPNQSESLAYVEQHQPEFQEILERVVDFAEVHTLAKSKVQQIVKLFEANQTADVKEIAASFIQLMQFNAMGAPSTFKFFQKDIERARYTSIKEIFDATIIYQSTTGLYETRRKVVD

SEQ ID NO: 421 - protein, 1150 aa, Enterococcus faecalis
MYSIGLDLGISSVGWSVIDERTGNVIDLGVRLFSAKNSEKNLERRTNRGGRRLIRRKTNRLKDAKKILAAVGFYEDKSLKNSCPYQLRVKGLTEPLSKGEIYKVTLHILKKRGISYLDEDDTEAAKESQDYKEQVRENAQLLTKYTPGQIQLQRLKENNRVKTGINAQGNYQLNVFKVSAYANELATILKTQQAFYPNELTDDWIALFVQPGIAEEAGLIYRKRPYYHGPGNEANNSPYGRWSDFKKTGQPATNIFDKLIGKDFQGELRASGLSLSAQQYNLLNDLTNLKIDGEIPLSPEQKEYILAELMTKEFTRFGVNDVVKLLGVKKERLSGWRLDKKGKPEIHTLKGYRNWRKIFAESGIDLAMLPTETIDCLAKILTLNTEREGIENTLAFELPELAESVKLLVLDRYKELSQSVSTQAWHRFSLKTLHLLIPELMNATSEQNTLLEQFQLKSDVRKRYSEYKKLPTKDVLTEIYNPTVNKTVSQAFKVIDALLVKYGKEQIRYITIEMPRDDNEEDEKKRIKELHAKNSQRKNDSQSYFMQKSGWSQEKFQTTIQKNRRFLAKLLYYYEQDGICAYTGLSISPELLVSDSTEIDHIIPISISLDDSINNKVLVLSKANQVKGQQTPYDAWMDGSFKKINGKFSNWDDYQKWVESRHFSHKKENNLLETRNIFDSEQVEKFLARNLNDTRYASRLVLNTLQSFFANQETKVRVVNGSFTHTLRKKWGADLDKTRETHHHHAVDATLCAVTPFVKVSRYHYAVKEETGEKVMREIDFETGEIVDEMSYREFKKSKKYERKTYQVKWPNFREQLKPVNLHPRIKFSHQVDRKANRKLSDATIYSVREKTEVKTLKSGKQKITTDEYTIGKIKDIYTVDGWEAFKKKQDKLLMKDLDEKTYERLLSIAETTPDFQEVEEKNGKVKRVKRSPFAVYCEENDIPAIRKYAKKNNGPLIRSLKYYDGKLNKHINITKDSQGRPVEKTKNGRKVTLQSLKPYRYDIYQDLETKAYYTVQLYYSDLRFVEGKYGITEKEYMKKVAEQTKGQVVRFCFSLQKNDGLEIEWKDSQRYDVRFYNFQSANSINFKGLEQEMMPAENQFKQKPYNNGAINLNIAKYGKEGKKLRKFNTDILGKKHYLYYEKEPKNIIK

SEQ ID NO: 422 - protein, 1150 aa, Enterococcus faecalis
MYSIGLDLGISSVGWSVIDERTGNVIDLGVRLFSAKNSEKNLERRTNRGGRRLIRRKTNRLKDAKKILAAVGFYEDKSLKNSCPYQLRVKGLTEPLSKGEIYKVTLHILKKRGISYLDEDDTEAAKESQDYKEQVRKNAQLLTKYTPGQIQLQRLKENNRVKTGINAQGNYQLNVFKVSAYANELATILKTQQAFYPNELTDDWIALFVQPGIAEEAGLIYRKRPYYHGPGNEANNSPYGRWSDFKKTGQPATNIFDRLIGKDFQGELRASGLSLSAQQYNLLNDLTNLKIDGEIPLSPEQKEYILAELMTKEFTRFGVNDVAKLLGVKKERLSGWRLDKKGKPEIHTLKGYRNWRKIFAESGIDLATLPTETIDCLAKVLTLNTEHEGIENTLAFELPELAESVKLLVLDRYKELSQSVSTQAWHRFSLKTLHLLIPELMNATSEQNTLLEQFQLKSDVRKRYSEYKKLPTKDVLTEIYNPTVNKTVSQAFKVIDALLVKYGKEQIRYITIEMPRDDNEEDEKKRIKELHAKNSQRKNDSQSYFMQKSGWSQEKFQTTIQKNRRFLAKLLYYYEQDGICAYTGLSISPELLVSDSTEIDHIIPISISLDDSINNKVLVLSKANQVKGQQTPYDAWMDGSFKKINGKFSNWDDYQKWVESRHFSHKKENNLLETRNIFDSEQVEKFLARNLNDTRYASRLVLNTLQSFFANHETKVRVVNGSFTHTLRKKWGADLDKTRETHHHHAVDATLCAVTPFVKVSRYHYAVKEETGEKVMREIDFETGEIVDEMSYQEFKKSKKYERKTYQVKWPNFREQLKPVNLHPRIKFSHQVDRKANRKLSDATIYSVREKTEVKTLKSGKQKITTDEYTIGKIKDIYTVDGWEAFKKKQDKLLMKDLDEKTYERLLSIAETTPDFQEVEEKNGKVKRVKRSPFAVYCEENDIPAIQKYAKKNNGPLIRSLKYYDGKLNKHINITKDSQGRPVEKTKNGRKVTLQSLKPYRYDIYQDLETKAYYTVQLYYSDLRFVEGKYGITEKEYMKKVAEQTKGQVVRFCFSLQKNDGLEIEWKDSQRYDVRFYNFQSANSINFKGLEQEMMPAENQFKQKPYNNGAINLNIAKYGKEGKKLRKFNTDILGKKHYLYYEKEPKNIIK

SEQ ID NO: 423 - protein, 1150 aa, Enterococcus faecalis
MYSIGLDLGISSVGWSVIDERTGNVIDLGVRLFSAKNSEKNLERRTNRGGRRLIRRKTNRLKDAKKILAAVGFYEDKSLKNSCPYQLRVKGLTEPLSKGEIYKVTLHILKKRGISYLDEDDTEAAKESQDYKEQVRKNAQLLTKYTPGQIQLQRLKENNRVKTGINVQGNYQLNVFKVSAYANELATILKTQQAFYPNELTDDWIALFVQPGIAEEAGLIYRKRPYYHGPGNEANNSPYGRWSDFQKTGEPATNIFDKLIGKDFQGELRASGLSLSAQQYNLLNDLTNLKIDGEVPLSSEQKEYILTELMTKEFTRFGVNDVVKLLGVKKERLSGWRLDKKGKPEIHTLKGYRNWRKIFAEAGIDLATLPTETIDCLAKVLTLNTEREGIENTLAFELPELSESVKLLVLDRYKELSQSISTQSWHRFSLKTLHLLIPELMNATSEQNTLLEQFQLKSDVRKRYSEYKKLPTKDVLAEIYNPTVNKTVSQAFKVIDALLVKYGKEQIRYITIEMPRDDNEEDEKKRIKELHAKNSQRKNDSQSYFMQKSGWSQEKFQTTIQKNRRFLAKLLYYYEQDGICAYTGLPISPELLVSDSTEIDHIIPISISLDDSINNKVLVLSKANQVKGQQTPYDAWMDGSFKKINGKFSNWDDYQKWVESRHFSHKKENNLLETRNIFDSEQVEKFLARNLNDTRYASRLVLNTLQSFFTNQETKVRVVNGSFTHTLRKKWGADLDKTRETHHHHAVDATLCAVTPFVKVSRYHYAVKEETGEKVMREIDFETGEIVNEMSYREFKKSKKYERKTYQVKWPNFREQLKPVNLHPRIKFSHQVDRKANRKLSDATIYSVREKTEVKTLKSGKQKITTDEYTIGKIKDIYTLDGWEAFKKKQDKLLMKDLDEKTYERLLSIAETTPDFQEVEEKNGKVKRVKRSPFAVYCEENDIPAIQKYAKKNNGPLIRSLKYYDGKLNKHINITKDSQGRPVEKTKNGRKVTLQSLKPYRYDIYQDLETKAYYTVQLYYSDLRFVEGKYGITEKEYMKKVAEQTKGQVVRFCFSLQKNDGLEIEWKDSQRYDVRFYNFQSANSINFKGLEQEIMPAENQFKQKPYNNGAINLNIAKYGKEGKKLRKFNTDILGKKHYLFYEKEPKNIIK

SEQ ID NO: 424 - protein, 1150 aa, Enterococcus faecalis; identical to SEQ ID NO: 193

SEQ ID NO: 425 - protein, 1150 aa, Enterococcus faecalis; identical to SEQ ID NO: 194

SEQ ID NO: 426 - protein, 1340 aa, Enterococcus faecium
MKKEYTIGLDIGTNSVGWSVLTDDYRLVSKKMKVAGNTEKSSTKKNFWGVRLFDEGQTAEARRSKRTARRRLARRRQRILELQKIFAPEILKIDEHFFARLNESFLVLDEKKQSRHPVFATIKQEKSYHQTYPTIYHLRQALADSSEKADIRLVYLAMAHLLKYRGHFLIEGELNTENSSVTETFRQFLSTYNQQFSEADDKQTEKLDEAVDCSFVFTEKMSKTKKAETLLKYFPHEKSNGYLSQFIKLMVGNQGNFKNVFGLEEEAKLQFSKETYEEDLEELLEKIGDDYIDLFVQAKNVYDAVLLSEILSDSTKNTRAKLSAGMIRRYDAHKEDLVLLKRFVKENLPKKYRAFFGDNSVNGYAGYIEGHATQEDFYKFVKKELTGIRGSEVFLTKIEQENFLRKQRTFDNGVIPHQIHLTELRAIIANQKKHYPFLKEEQEKLESLLTFKIPYYVGPLAKKQENSPFAWLIRKSEEKIKPWNLPEIVDMEGSAVRFIERMNNTDMYIPHNKVLPKNSLLYQKFSIYNELTKVRYQDERGQMNYFSSIEKKEIFHELFEKNRKVTKKDLQEFLYLKYDIKHAELSGIEKAFNASYTTYHDFLTMSENKREMKQWLEDPELASMFEEIIKTLTVFEDREMIKTRLSHHEATLGKHIIKKLTKKHYTGWGRLSKELIQGIRDKQSNKTILDYLINDDDFPHHRNRNFMQLINDDSLSFKKEIKKAQMITDTENLEEIVKELTGSPAIKKGILQSLKIVDEIVGIMGYEPANIVVEMARENQTTGRGLKSSRPRLKALEESLKDFGSQLLKEYPTDNSSLQKDRLYLYYLQNGRDMYTGAPLDIHRLSDYDIDHIIPRSFTTDNSIDNKVLVSSKENRLKKDDVPSEKVVKKMRSFWYDLYSSKLISKRKLDNLTKIKLTEEDKAGFIKRQLVETRQITKHVAGILHHRFNKAEDTNEPIRKVRIITLKSALVSQFRNRFGIYKVREINEYHHAHDAYLNGVVALALLKKYPQLAPEFVYGEYLKFNAHKANKATVKKEFYSNIMKFFESDTPVCDENGEIFWDKSKSIAQVKKVINHHHMNIVKKTEIQKGGFSKETVEPKKDSSKLLPRKNNWDPAKYGGLGSPNVAYTVAFTYEKGKARKRTNALEGITIMEREAFEQSPVLFLKNKGYEQAEIEMKLPKYALFELENGRKRMVASNKEAQKANSFLLPEHLVTLLYHAKQYDEISHKESFDYVNEHHKEFSEVFARVLEFAGKYTLAEKNIEKLEKIYKENQTDDLAKLASSFVNLMQFNAMGAPADFKFFDVTIPRKRYTSLTEIWQSTIIHQSITGLYETRIRMGK

SEQ ID NO: 427 - protein, 1339 aa, Enterococcus faecium
MKKEYTIGLDIGTNSVGWSVLTDDYRLVSKKMKVAGNTEKSSTKKNFWGVRLFDEGQTAEARRSKRTARRRLARRRQRILELQKIFAPEILKIDEHFFARLNESFLVLDEKKQSRHPVFATIKQEKSYHQTYPTIYHLRQALADSSEKADIRLVYLAMAHLLKYRGHFLIEGELNTENSSVTETFRQFLSTYNQQFSEADDKQTEKLDEAVDCSFVFTEKMSKTKKAETLLKYFPHEKSNGYLSQFIKLMVGNQGNFKNVFGLEEAKLQFSKETYEEDLEELLEKIGDDYIDLFVQAKNVYDAVLLSEILSDSTKNTRAKLSAGMIRRYDAHKEDLVLLKRFVKENLPKKYRAFFGDNSVNGYAGYIEGHATQEDFYKFVKKELTGIRGSEVFLTKIEQENFLRKQRTFDNGVIPHQIHLTELRAIIANQKKHYPFLKEEQEKLESLLTFKIPYYVGPLAKKQENSPFAWLIRKSEEKIKPWNLPEIVDMEGSAVRFIERMINTDMYMPHNKVLPKNSLLYQKFSIYNELTKVRYQDERGQMNYFSSIEKKEIFHELFEKNRKVTKKDLQEFLYLKYDIKHAELSGIEKAFNASYTTYHDFLTMSENKREMKQWLEDPELASMFEEIIKTLTVFEDREMIKTRLSHHEATLGKHIIKKLTKKHYTGWGRLSKELIQGIRDKQSNKTILDYLINDDDFPHHRNRNFMQLINDDSLSFKKEIKKAQMITDTENLEEIVKELTGSPAIKKGILQSLKIVDEIVGIMGYEPANIVVEMARENQTTGRGLKSSRPRLKALEESLKDFGSQLLKEYPTDNSSLQKDRLYLYYLQNGRDMYTGAPLDIHRLSDYDIDHIIPRSFTTDNSIDNKVLVSSKENRLKKDDVPSEKVVKKMRSFWYDLYSSKLISKRKLDNLTKIKLTEEDKAGFIKRQLVETRQITKHVAGILHHRFNKAEDTNEPIRKVRIITLKSALVSQFRNRFGIYKVREINEYHHAHDAYLNGVVALALLKKYPQLAPEFVYGEYLKFNAHKANKATVKKEFYSNIMKFFESDTPVCDENGEIFWDKSKSIAQVKKVINHHHMNIVKKTEIQKGGFSKETVEPKKDSSKLLPRKNNWDPAKYGGLGSPNVAYTVAFTYEKGKARKRTNALEGITIMEREAFEQSPVLFLKNKGYEQAEIEMKLPKYALFELENGRKRMVASNKEAQKANSFLLPEHLVTLLYHAKQYDEISHKESFDYVNEHHKEFSEVFARVLEFAGKYTLAEKNIEKLEKIYKENQTDDLAKLASSFVNLMQFNAMGAPADFKFFDVTIPRKRYTSLTEIWQSTIIHQSITGLYETRIRMGK

SEQ ID NO: 428 - protein, 1340 aa, Enterococcus faecium
MKKEYTIGLDIGTNSVGWSVLTDDYRLVSKKMKVAGNTEKSSTKKNFWGVRLFDEGQTAEARRSKRTARRRLARRRQRILELQKIFAPEILKIDEHFFARLNESFLVLDEKKQSRHPVFATIKQEKSYHQTYPTIYHLRQALADSSEKADIRLVYLAMAHLLKYRGHFLIEGELNTENSSVTETFRQFLSTYNQQFSEADDKQTEKLDEAVDCSFVFTEKMSKTKKAETLLKYFPHEKSNGYLSQFIKLMVGNQGNFKNVFGLEEEAKLQFSKETYEEDLEELLEKIGDDYIDLFVQAKNVYDAVLLSEILSDSTKNTRAKLSAGMIRRYDAHKEDLVLLKRFVKENLPKKYRAFFGDNSVNGYAGYIEGHATQEDFYKFVKKELTGIRGSEVFLTKIEQENFLRKQRTFDNGVIPHQIHLTELRAIIANQKKHYPFLKEEQEKLESLLTFKIPYYVGPLAKKQENSPFAWLIRKSEEKIKPWNLPEIVDMEGSAVRFIERMINTDMYIPHNKVLPKNSLLYQKFSIYNELTKVRYQDERGQMNYFSSIEKKEIFHELFEKNRKVTKKDLQEFLYLKYDIKHAELSGIEKAFNASYTTYHDFLTMSENKREMKQWLEDPELASMFEEIIKTLTVFEDREMIKTRLSHHEATLGKHIIKKLTKKHYTGWGRLSKELIQGIRDKQSNKTILDYLINDDDFPHHRNRNFMQLINDDSLSFKKEIKKAQMITDTENLEEIVKELTGSPAIKKGILQSLKIVDEIVGIMGYEPANIVVEMARENQTTGRGLKSSRPRLKALEESLKDFGSQLLKEYPTDNSSLQKDRLYLYYLQNGRDMYTGAPLDIHRLSDYDIDHIIPRSFTTDNSIDNKVLVSSKENRLKKDDVPSEKVVKKMRSFWYDLYSSKLISKRKLDNLTKIKLTEEDKAGFIKRQLVETRQITKHVAGILHHRFNKAEDTNEPIRKVRIITLKSALVSQFRNRFGIYKVREINEYHHAHDAYLNGVVALALLKKYPQLAPEFVYGEYLKFNAHKANKATVKKEFYSNIMKFFESDTPVCDENGEIFWDKSKSIAQVKKVINHHHMNIVKKTEIQKGGFSKETVEPKKDSSKLLPRKNNWDPAKYGGLGSPNVAYTVAFTYEKGKARKRTNALEGITIMEREAFEQSPVLFLKNKGYEQAEIEMKLPKYALFELENGRKRMVASNKEAQKANSFLLPEHLVTLLYHAKQYDEISHKESFDYVNEHHKEFSEVFARVLEFAGKYTLAEKNIEKLEKIYKENQTDDLAKLASSFVNLMQFNAMGAPADFKFFDVTIPRKRYTSLTEIWQSTIIHQSITGLYETRIRMGK

SEQ ID NO: 429 - protein, 1340 aa, Enterococcus faecium
MKKEYTIGLDIGTNSVGWSVLTDDYRLVSKKMKVAGNTEKSSTKKNFWGVRLFDEGQTAEARRSKRTARRRLARRRQRILELQKIFAPEILKIDEHFFARLNESFLVLDEKKQSRHPVFATIKQEKSYHQTYPTIYHLRQALADSSEKADIRLVYLAMAHLLKYRGHFLIEGELNTENSSVTETFRQFLSTYNQQFSEADDKQTEKLDEAVDCSFVFTEKMSKTKKAETLLKYFPHEKSNGYLSQFIKLMVGNQGNFKNVFGLEEEAKLQFSKETYEEDLEELLEKIGDDYIDLFVQAKNVYDAVLLSEILSDSTKNTRAKLSAGMIRRYDAHKEDLVLLKRFVKENLPKKYRAFFGDNSVNGYAGYIEGHATQEDFYKFVKKELTGIRGSEVFLTKIEQENFLRKQRTFDNGVIPHQIHLTELRAIIANQKKHYPFLKEEQEKLESLLTFKIPYYVGPLAKKQENSPFAWLIRKSEEKIKPWNLPEIVDMEGSAVRFIERMINTDMYMPHNKVLPKNSLLYQKFSIYNELTKVRYQDERGQMNYFSSIEKKEIFHELFEKNRKVTKKDLQEFLYLKYDIKHAELSGIEKAFNASYTTYHDFLTMSENKREMKQWLEDPELASMFEEIIKTLTVFEDREMIKTRLSHHEATLGKHIIKKLTKKHYTGWGRLSKELIQGIRDKQSNKTILDYLINDDDFPHHRNRNFMQLINDDSLSFKKEIKKAQMITDTENLEEIVKELTGSPAIKKGILQSLKIVDEIVGIMGYEPANIVVEMARENQTTGRGLKSSRPRLKALEESLKDFGSQLLKEYPTDNSSLQKDRLYLYYLQNGRDMYTGAPLDIHRLSDYDIDHIIPRSFTTDNSIDNKVLVSSKENRLKKDDVPSEKVVKKMRSFWYDLYSSKLISKRKLDNLTKIKLTEEDKAGFIKRQLVETRQITKHVAGILHHRFNKAEDTNEPIRKVRIITLKSALVSQFRNRFGIYKVREINEYHHAHDAYLNGVVALALLKKYPQLAPEFVYGEYLKFNAHKANKATVKKEFYSNIMKFFESDTPVCDENGEIFWDKSKSIAQVKKVINHHHMNIVKKTEIQKGGFSKETVEPKKDSSKLLPRKNNWDPAKYGGLGSPNVAYTVAFTYEKGKARKRTNALEGITIMEREAFEQSPVLFLKNKGYEQAEIEMKLPKYALFELENGRKRMVASNKEAQKANSFLLPEHLVTLLYHAKQYDEISHKESFDYVNEHHKEFSEVFARVLEFAGKYTLAEKNIEKLEKIYKENQTDDLAKLASSFVNLMQFNAMGAPADFKFFDVTIPRKRYTSLTEIWQSTIIHQSITGLYETRIRMGK

SEQ ID NO: 430 - protein, 1339 aa, Enterococcus faecium
MKKEYTIGLDIGTNSVGWSVLTDDYRLVSKKMKVAGNTEKSSTKKNFWGVRLFDEGQTAEARRSKRTARRRLARRRQRILELQKIFAPEILKIDEHFFARLNESFLVLDEKKQSRHPVFATIKQEKSYHQTYPTIYHLRQALADSSEKADIRLVYLAMAHLLKYRGHFLIEGELNTENSSVTETFRQFLSTYNQQFSEADDKQTEKLDEAVDCSFVFTEKMSKTKKAETLLKYFPHEKSNGYLSQFIKLMVGNQGNFKNVFGLEEAKLQFSKETYEEDLEELLEKIGDDYIDLFVQAKNVYDAVLLSEILSDSTKNTRAKLSAGMIRRYDAHKEDLVLLKRFVKENLPKKYRAFFGDNSVNGYAGYIEGHATQEDFYKFVKKELTGIRGSEVFLTKIEQENFLRKQRTFDNGVIPHQIHLTELRAIIANQKKHYPFLKEEQEKLESLLTFKIPYYVGPLAKKQENSPFAWLIRKSEEKIKPWNLPEIVDMEGSAVRFIERMINTDMYIPHNKVLPKNSLLYQKFSIYNELTKVRYQDERGQMNYFSSIEKKEIFHELFEKNRKVTKKDLQEFLYLKYDIKHAELSGIEKAFNASYTTYHDFLTMSENKREMKQWLEDPELASMFEEIIKTLTVFEDREMIKTRLSHHEATLGKHIIKKLTKKHYTGWGRLSKELIQGIRDKQSNKTILDYLINDDDFPHHRNRNFMQLINDDSLSFKKEIKKAQMITDTENLEEIVKELTGSPAIKKGILQSLKIVDEIVGIMGYEPANIVVEMARENQTTGRGLKSSRPRLKALEESLKDFGSQLLKEYPTDNSSLQKDRLYLYYLQNGRDMYTGAPLDIHRLSDYDIDHIIPRSFTTDNSIDNKVLVSSKENRLKKDDVPSEKVVKKMRSFWYDLYSSKLISKRKLDNLTKIKLTEEDKAGFIKRQLVETRQITKHVAGILHHRFNKAEDTNEPIRKVRIITLKSALVSQFRNRFGIYKVREINEYHHAHDAYLNGVVALALLKKYPQLAPEFVYGEYLKFNAHKANKATVKKEFYSNIMKFFESDTPVCDENGEIFWDKSKSIAQVKKVINHHHMNIVKKTEIQKGGFSEETVEPKKDSSKLLPRKNNWDPAKYGGLGSPNVAYTVAFTYEKGKARKRTNALEGITIMEREAFEQSPVLFLKNKGYEQAEIEMKLPKYALFELENGRKRMVASNKEAQKANSFLLPEHLVTLLYHAKQYDEISHKESFDYVNEHHKEFSEVFARVLEFAGKYTLAEKNIEKLEKIYKENQTDDLAKLASSFVNLMQFNAMGAPADFKFFDVTIPRKRYTSLTEIWQSTIIHQSITGLYETRIRMGK

SEQ ID NO: 431 - protein, 1340 aa, Enterococcus faecium
MKKEYTIGLDIGTNSVGWSVLTDDYRLVSKKMKVAGNTEKSSTKKNFWGVRLFDEGQTAEARRSKRTARRRLARRRQRILELQKIFAPEILKIDEHFFARLNESFLVLDEKKQSRHPVFATIKQEKSYHQTYPTIYHLRQALADSSEKADIRLVYLAMAHLLKYRGHFLIEGELNTENSSVTETFRQFLSTYNQQFSEADDKQTEKLDEAVDCSFVFTEKMSKTKKAETLLKYFPHEKSNGYLSQFIKLMVGNQGNFKNVFGLEEEAKLQFSKETYEEDLEELLEKIGDDYIDLFVQAKNVYDAVLLSEILSDSTKNTRAKLSAGMIRRYDAHKEDLVLLKRFVKENLPKKYRAFFGDNSVNGYAGYIEGHATQEDFYKFVKKELTGIRGSEVFLTKIEQENFLRKQRTFDNGVIPHQIHLTELRAIIANQKKHYPFLKEEQEKLESLLTFKIPYYVGPLAKKQENSPFAWLIRKSEEKIKPWNLPEIVDMEGSAVRFIERMINTDMYIPHNKVLPKNSLLYQKFSIYNELTKVRYQDERGQMNYFSSIEKKEIFHELFEKNRKVTKKDLQEFLYLKYDIKHAELSGIEKAFNASYTTYHDFLTMSENKREMKQWLEDPELASMFEEIIKTLTVFEDREMIKTRLSHHEATLGKHIIKKLTKKHYTGWGRLSKELIQGIRDKQSNKTILDYLINDDDFPHHRNRNCMQLINDDSLSFKKEIKKAQMITDTENLEEIVKELTGSPAIKKGILQSLKIVDEIVGIMGYEPANIVVEMARENQTTGRGLKSSRPRLKALEESLKDFGSQLLKEYPTDNSSLQKDRLYLYYLQNGRDMYTGAPLDIHRLSDYDIDHIIPRSFTTDNSIDNKVLVSSKENRLKKDDVPSEKVVKKMRSFWYDLYSSKLISKRKLDNLTKIKLTEEDKAGFIKRQLVETRQITKHVAGILHHRFNKAEDTNEPIRKVRIITLKSALVSQFRNRFGIYKVREINEYHHAHDAYLNGVVALALLKKYPQLAPEFVYGEYLKFNAHKANKATVKKEFYSNIMKFFESDTPVCDENGEIFWDKSKSIAQVKKVINHHHMNIVKKTEIQKGGFSKETVEPKKDSSKLLPRKNNWDPTKYGGLGSPNVAYTVAFTYEKGKARKRTNALEGITIMEREAFEQSPVLFLKNKGYEQAEIEMKLPKYALFELENGRKRMVASNKEAQKANSFLLPEHLVTLLYHAKQYDEISHKESFDYVNEHHKEFSEVFARVLEFAGKYTLAEKNIEKLEKIYKENQTDDLAKLASSFVNLMQFNAMGAPADFKFFDVTIPRKRYTSLTEIWQSTIIHQSITGLYETRIRMGK

SEQ ID NO: 432 - protein, 892 aa, Enterococcus faecium
MTFKIPYYVGPLAKKQENSPFAWLIRKSEEKIKPWNLPEIVDMEGSAVRFIERMINTDMYMPHNKVLPKNSLLYQKFSIYNELTKVRYQDERGQMNYFSSIEKKEIFHELFEKNRKVTKKDLQEFLYLKYDIKHAELSGIEKAFNASYTTYHDFLTMSENKREMEQWLEDPELASMFEEIIKTLTVFEDREMIKTRLSHHKATLGKHIIKKLTKKHYTGWGRLSKELIQGIRDKQSNKTILDYLINDDDFPHHRNRNFMQLINDDSLSFKKEIKKAQMITDTENLEEIVKELTGSPAIKKGILQSLKIVDEIVGIMGYEPANIVVEMARENQTTGRGLKSSRPRLKALEESLKDFGSQLLKEYPTDNSSLQKDRLYLYYLQNGRDMYTGAPLDIHRLSDYDIDHIIPRSFTTDNSIDNKVLVSSKENRLKKDDVPSEKVVKKMRSFWYDLYSSKLISKRKLDNLTKIKLTEEDKAGFIKRQLVETRQITKHVAGILHHRFNKAEDTNEPIRKVRIITLKSALVSQFRNRFGIYKVREINEYHHAHDAYLNGVIALALLKKYPQLAPEFVYGEYLKFNAHKANKATVKKEFYSNIMKFFESDTPVCDENGEIFWDKSKSIAQVKKVINHHHMNIVKKTEIQKGGFSKETVEPKKDSSKLLPRKNNWDPAKYGGLGSPNVAYTVAFTYEKGKARKRTNALEGITIMEREAFEQSPVLFLKNKGYEQAEIEMKLPKYALFELENGRKRMVASNKEAQKANSFLLPEHLVTLLYHAKQYDEISHKESFDYVNEHHKEFSEVFARVLEFAGKYTLAEKNIEKLEKIYKENQTDDLAKLASSFVNLMQFNAMGAPADFKFFDVTIPRKRYTSLTEIWQSTIIHQSITGLYETRIRMGK

SEQ ID NO: 433 - protein, 1336 aa, Enterococcus hirae
MTKDYTIGLDIGTNSVGWAVLTDDYQLMKRKMSVHGNTEKKKIKKNFWGARLFDEGQTAEFRRTKRTNRRRLARRKYRLSKLQDLFAEELCKQDDCFFVRLEESFLVPEEKQYKPASIFPTLEEEKEYYQKYPTIYHLRQKLVDSTEKEDLRLVYLALAHLLKYRGHFLFEGDLDTENTSIEESFRVFLEQYSKQSDQPLIVHQPVLTILTDKLSKTKKVEEILKYYPTEKINSFFAQCLKLIVGNQANFKRIFDLEAEVKLQFSKETYEEDLESLLEKIGDEYLDIFLQAKKVHDAILLSEIISSTVKHTKAKLSSGMVERYERHKADLAKFKQFVKENVPQKATVFFKDTTKNGYAGYIKGKTTQEEFYKFVKKELSGVVGSEPFLEKIDQETFLLKQRTYTNGVIPHQVHLIELKAIIDQQKQHYPFLEEAGPKIIALFKFRIPYYVGPLAKEQEASSFAWIERKTAEKINPWNFSEVVDIEKSAMRFIQRMTKQDTYLPTEKVLPKNSLLYQKYMIFNELTKVSYKDERGVKQYFSGDEKQQIFKQLFQKERGKITVKKLQNFLYTHYHIENAQIFGIEKAFNASYSTYHDFMKLAKTNQKAMQEWLEQPEMEPIFEDIVKILTIFEDRQMIKHQLSKYQEVFGEKLLKEFARKHYTGWGRFSAKLIHGIRDRKTNKTILDYLINDDDVPANRNRNLMQLINDEHLSFKEEIAKATVFSKHKSLVDVIQDLPGSPAIKKGIWQSLKIVEELIAIIGYKPKNIVIEMARENQKTHRTSPRLKALENGLKQIGSTLLKEQPTDNKALQKERLYLYYLQNGRDMYTGEPLEIENLHQYEVDHIIPRSFIVDNSIDNKVLVASKQNQKKRDDVPKKQIVNEQRIFWNQLKEAKLISPKKYAYLTKIELTPEDKARFIQRQLVETRQITKHVANILHQSFNQEEEGTDCDGVQIITLKATLTSQFRQTFGLYKVREINPHHHAHDAYLNGFIANVLLKRYPKLAPEFVYGKYVKYSLARENKATAKKEFYSNILKFLESDEPFCDENGEIYWEKSHHLPRIKKVLSSHQVNVVKKVEQQKGGFYKETVNSKEKPDKLIERKNNWDVTKYGGFGSPVIAYAIAFVYAKGKTQKKTRAIEGITIMEQAAFEKDPTTFLKEKGFPQVTEFIKLPKYTLFEFDNGRRRFLASHKESQKGNPFILSDQLVTLLYHAQHYDKITYQESFDYVNTHLSDFSAILTEVLAFAEKYTLADKNIERIQELYEENKYGETSMIAQSFLQLLQFNAIGAPADFKFFGVTIPRKRYTSLTEIWDATIIYQSVTGLYETRIRMGDLWAGEQ

SEQ ID NO: 434 - protein, 116 aa, Enterococcus sp.
MYSIGLDLGISSVGWSVIDERTGNVIDLGVRLFSAKNSEKNLERRTNRGGRRLIRRKTNRLKDAKKILAAVGFYEDKSLKNSCPYQLRVKGLTELLSKGEIYKVTLHILKNVELVT

SEQ ID NO: 435 - protein, 1391 aa, Eubacterium sp.
MENKQYYIGLDVGTNSVGWAVTDTSYNLLRAKGKDMWGARLFDEAKTAVERRTKRTSRRRSEREKARKAMLKELFADEINKVDPNFFIRLEESKFFLDDRSENNRQRYTLFNDAKFTDKDYYEKYKTIFHLRSALINSDEKFDVRLVFLAILNLFSHRGHFLNASLKGDGEIQGVDIFYNDLYEVCEEFEIDLPQISNIDNFEKILSQKGKSRTKILEELSEELSISKKEKIKYSLLKLICGMKIKVVDIYADEDIQEDDKKKDLGFRESDYEKSSLEVKEIIGDDHFELIERAKAVHDIGLLANIIGNSKYLCEARVEAYDNHHKDLQKIKELLKKYDIKAYTDMFRKMTDKNYSAYVGSVNSNIAKERRSVDNRKIEDLYEYIKKIALKNISDDNEDKIEILKKIETGEFLKKQLTASNGVIPNQLQSRELRAILKKAENYLPFLKEKGEKNLTVSEMIIQLFEFQIPYYVGPLDKNPKKDKNANSWAVIPSGGRILPWNFEDKVDVKGSRKEFIEKMVRKCTYLSEEHTLPKQSLLYEKFMVLNEINNIKIDGEKISVEAKQKIYNDLFMKGKKVSQKAIKQELISLNIMSKDSVLSGIDTVCNAYLSSIAKFRGVFDENVNNQSTIDMIEDIIFLKTVYSDEKRFVKEEIVEKYGDEIDKDKIKRILGFKFSNWGNISKSFLELEGADVGTGEIRSIIQSLWETNFNLMELLSSRFTYMDELEKRVKKLEKPLSEWTIEDLDDMYLSSPVKRMIWQSMKIVDEIQTVIGYAPKRIFVEMTRSEGEKVRTKSRKDRLKELYSAIKEDSKQWVKELDAKDESYFRSKKMYLYYLQKGRCMYSGEVIELDKLMDDNLYDIDHIYPRSFVKDDSLDNLVLVKKEINNRKQNDPITPQIQASCQGFWKVLHEQGFISNEKYSRLTRKTQEFSDEEKLSFINRQIVETGQATKCMAQILQKSMGEDVDVVFSKARLVSEFRHKFELFKSRLINDFHHANDAYLNIVVGNSYFVKFTRNPANFIKDARKNPDNPAYKYHMDRFFERDVKSKSEVAWIGQSEGNAGTIAIVKKTMSKNSPLITKKVEEGHGSITKETIVGVKEIKFGRNKVEKADKTPKKANLQAYRPIKTSDERLCNILRYGGRTSISISGYCLVEYVKKRKTIRSLEAIPVYLGRKDSLSEEKLLNYFRYNLNDGGKDSVSDIRLCLPFISTNSLVKIDGYLYYLGGKNDDRIQLYNAYQLKMKKEEVEYIRKIEKAVSMSKFDEIDREKNPVLTEEKNIELYNKIQDKFENTVFSKRMSLVKYNKKDLSFGDFLKNKKSKFEEIDLEKQCKVLYNIIFNLSNLKEVDLSDIGGSKSTGKCRCKKNITNYKEFKLIQQSITGLYSCEKDLMTI

SEQ ID NO: 436 - protein, 1391 aa, Eubacterium yurii
MENKQYYIGLDVGTNSVGWAVTDTSYNLLRAKGKDMWGARLFEKANTAAERRTKRTSRRRSEREKARKAMLKELFADEINRVDPSFFIRLEESKFFLDDRSENNRQRYTLFNDATFTDKDYYEKYKTIFHLRSALINSDEKFDVRLVFLAILNLFSHRGHFLNASLKGDGDIQGMDVFYNDLVESCEYFEIELPRITNIDNFEKILSQKGKSRTKILEELSEELSISKKDKSKYNLIKLISGLEASVVELYNIEDIQDENKKIKIGFRESDYEESSLKVKEIIGDEYFDLVERAKSVHDMGLLSNIIGNSKYLCEARVEAYENHHKDLLKIKELLKKYDKKAYNDMFRKMTDKNYSAYVGSVNSNIAKERRSVDKRKIEDLYKYIEDTALKNIPDDNKDKIEILEKIKLGEFLKKQLTASNGVIPNQLQSRELRAILKKAENYLPFLKEKGEKNLTVSEMIIQLFEFQIPYYVGPLDKNPKKDNKANSWAKIKQGGRILPWNFEDKVDVKGSRKEFIEKMVRKCTYISDEHTLPKQSLLYEKFMVLNEINNIKIDGEKISVEAKQKIYNDLFVKGKKVSQKDIKKELISLNIMDKDSVLSGTDTVCNAYLSSIGKFTGVFKEEINKQSIVDMIEDIIFLKTVYGDEKRFVKEEIVEKYGDEIDKDKIKRILGFKFSNWGNLSKSFLELEGADVGTGEVRSIIQSLWETNFNLMELLSSRFTYMDELEKRVKKLEKPLSEWTIEDLDDMYLSSPVKRMIWQSMKIVDEIQTVIGYAPKRIFVEMTRSEGEKVRTKSRKDRLKELYNGIKEDSKQWVKELDSKDESYFRSKKMYLYYLQKGRCMYSGEVIELDKLMDDNLYDIDHIYPRSFVKDDSLDNLVLVKKEINNRKQNDPITPQIQASCQGFWKILHDQGFMSNEKYSRLTRKTQEFSDEEKLSFINRQIVETGQATKCMAQILQKSMGEDVDVVFSKARLVSEFRHKFELFKSRLINDFHHANDAYLNIVVGNSYFVKFTRNPANFIKDARKNPDNPVYKYHMDRFFERDVKSKSEVAWIGQSEGNSGTIVIVKKTMAKNSPLITKKVEEGHGSITKETIVGVKEIKFGRNKVEKADKTPKKPNLQAYRPIKTSDERLCNILRYGGRTSISISGYCLVEYVKKRKTIRSLEAIPVYLGRKDSLSEEKLLNYFRYNLNDGGKDSVSDIRLCLPFISTNSLVKIDGYLYYLGGKNDDRIQLYNAYQLKMKKEEVEYIRKIEKAVSMSKFDEIDREKNPVLTEEKNIELYNKIQDKFENTVFSKRMSLVKYNKKDLSFGDFLKNKKSKFEEIDLEKQCKVLYNIIFNLSNLKEVDLSDIGGSKSTGKCRCKKNITNYKEFKLIQQSITGLYSCEKDLMTI

SEQ ID NO: 437 - protein, 1142 aa, Facklamia hominis
MYSVGLDIGIASCGYSIINDVNGNIVELGTLLFKSRNSDNNEERRTNRGSRRLINRRRTRLDDGKKLLAEKGFKQDSKLKHVCPYELRVKGLHEKLTQGEIYKVVLHILKKRGISYLDESDENSSGIDGASYKDQVNLNLNLQKELTPGQIQLKRLKENGRIKSGVTFENGYQLNVFSVSAYANELNKILTKQSEYYSEIDQIWIDRFTKNGYRKEAGLVYRKRPYYDGPGNEKNNSIYGRWANFKEDGHPKENIFDQLIGLDSVDSTQVRASASTLTAQKYNLLNDLNNLTIIEDDRKFTTDEKVSIINYLMTQDITRFGPKELAKFYQLEVDQIRGWRIDNKGNPEIHSLKVYRDWKKIFNTSSIDLTSIQTWVVDELANVITLNTEIPSTLATLKIKIPDIDQQILNFVENNFYELKKKTSKNSWHSFSLKTLNILIPELLNTSEEQNTILERLNLKFDLKNKYAEKNQIPVKELLEQIYNPTVTKSVHQSIKLFNEIIEKYGKNNISYVTIEMPRDKNDQDQKDTIKRINKLNSERKNDSEKYFLERSGWDTIRFESALKKPRFAEKLLFYYEQKGKCAYSGQDILAESLLNESCEVDHIIPLSISFDDSIHNKVLVTASSNQEKGQRTPYMAFIDGAKLGQSWDDFVAWVNSCGFHRKKVQNLLYEENIFNPDVQRGFVSRNLNDTRYASRIVLNAIQSFFYKQKDLTKVKVVNGSFTHTLRKKWGSSLDKNRDTYHHHAVDATLCAVTPFINIVKYEFFEEDGIKYMVDLTTGEKVAYSDYKKMKFYDKRAYVPIWDGFIKQLTPANLYPKIKFSHQVDSKWNRKISDATIYSTRKIVETKINKKGVAKETVKDIVIDKIKDIYTPEGWRKFKEKQDKLLMKNFDEKTYNKLIKIAKEYPEKKEVQTSNGKVSLVEVSPFKMYCEEQNVPAIRKYSKKGNGPYIRSLKFYDKELGKHINITKDSYGNDIERTIRNKKIILKNQNSWRTDVYYNSVNNCYELLGIKYCHLKFYRGKYGIPKSIYDELKKEDEISSESVFKFSLYRHDRVRFEKDGEYIEALFGSKNESNKNYLELSPIDKNKWLSKENVKFFGEVAASGRFIKGLKPGIKVIKQSTDYMGHVYAIHQEKLKFVLSDA

SEQ ID NO: 438 - protein, 1347 aa, Finegoldia magna
MKSEKKYYIGLDVGTNSVGWAVTDEFYNILRAKGKDLWGVRLFEKAKTAADTRTFRSGRRRNDRKGMRLQILREIFEDEIKKVDKDFYDRLDESKFWAEDKKVSGKYSLFNDKNFSDKQYFEKFPTIFHLRKYLMEEHGKVDIRYYFLAINQMMKRRGHFLIDGQISHVTDDKPLKEQLILLINDLLKIELEEELMDSIFEILADVNEKRTDKKNNLKELIKGQDFNKQEGNILNSIFESIVTGKAKIKNIISDEDILEKIKEDNKEDFVLTGDSYEENLQYFEEVLQENITLFNTLKSTYDFVILQSILKGKSTLSDAQVERYDEHKKDLEILKKVIKKYDEDGKLFKQVFKEDNGNGYVSYIGYYLNKNKKITAKKKISNIEFTKYVKGILEKQCDCEDEAVKYLLGKIEQENFLLKQISSINSVIPHQIHLFELDKILENLAKNYPSFNNKKEEFTKIEKIRKTFTFRIPYYVGPLNDYHKNNGGNAWIFRNKGEKIRPWNFEKIVDLHKSEEEFIKRMLNQCTYLPEETVLPKSSILYSEYMVLNELNNLRIKGKPLDTDVKLKLIEELFKKKTKVTLKSIRDYMIRNNFADKEDFDNSEKNLEIVSNMKSYIDFNNILGDKFELEMVEDLIEKITIHTGNKTLLKKYIEETYPDLSSSQIQKIINLKYKDWGRLSRKLLDGIKGRNKTDDVNTVINFMRNSSDNLMQIIEGKNYSFNEYIDNLRKKYIPQEISYEVVENLYVSPSVKKMIWQVIRVTEEITKVMGYDPDKIFIEMAKSEEEKKTTISRKNKLLDLYKAIKKDERDSQYEKLLTGLNKLDESELRSKKLYLYYTQMGRDMYTGEKIDLDKLFDSTHYDKDHIIPQSMKKDDSIINNLVLVNKNANQTTKGNIYPVPSSIRNNPDIYNYWKYLMEKEFISKEKYNRLIRNTPLTNEELGVFINRQLVETRQSTKAIKELFEKFYQKSKIIPVKASLASDLRKDMNTLKSREVNDLHHAHDAFLNIVAGDVWNREFTSNPINYVNENREGDKVKYSLSKYFTRPRKSKGKVIWTPEKGRKLIVDTLNKPSVLISNESHVKKGELFNATISGKKDYKKGKIYLPLKKDDRLKDVSKYGGYKAINGAFFFLVEHTKSKKRIRSIELFPLHLLSKFYEDKNTVLDYAINVLQLQDPKIIIDKINYRTEIIIDNFSYLISTKSNDGSITVKPNEQMYWRVDEISNLKKIENKYKKDAILTEEDRKIMESYIDKIYQQFKAGKYKNRRTTDTIIEKYEIIDLDTLDNKQLYQLLVAFISLSYKTSNNAVDFTVIGLGTECGKPRITNLPDNTYLVYKSITGIYEKRIRIK

SEQ ID NO: 439 - protein, 1348 aa, Finegoldia magna; identical to SEQ ID NO: 237

SEQ ID NO: 440 - protein, 1516 aa, Flavobacteriaceae bacterium
MLKQQKDKIIGMNKKILGLDLGTNSIGWALVKQDLENKYGEIIGCGSRIIPMSQDVLGKFDAGISISQTAERTNYRSVRKLIQRNTLRRERLHRVLHQLDFLPKHYNDSIDFEKKLGQFKTDKETKLNYFVNQHGKHEFLFKDSFNEMVKEFKEEQPELFYIKNNGKETKIPYDWTIYYLRKKALSKKISKEELSWLVLNFNQKRGYYQLRGEIDEEKEKNKRYEKLYVSEVVKTNNTIKKTGEYLYDIYFDNGWKYEKQTTKPQDWLHKHKEFIITTTTLKNGETKRTFKTVDSEKDWIAIKSKTEQDIKESNKTVGAFIYDTLLKNPTQKIRGSLVKTIERKFYREEFEKILKEQIKHRPEINVNTAIGKENYTKCVTELYPRNEAHANNILTNDFNYLFTKDILFYQRPLKSKKSEIANCQYEYRTYIKKKEKTGKEERVKQPLKATPKSHPLFQEFRLWQFIHNLKIYIRETTVGNKPLFDVDITDTFFTSENDWATLFEYLNNKKEIEQKHVLEYLVSKKIISKSEKTDYRWNYVEDKKYPGNETRVDFINRLKKVENLNVDEFLTSELEFKLWHIIYSVTDKNEYEKALENFAIRQNIDKDSFVNSFKKFPPFKSDYGAYSTKAIKKLLPLMRLGKFWDGSEIPKVVVEKITDIKTRLTSVNYDESLFKKDEKKILETIVDDITPKQLLKSFVKLKGKNHLAGLNTYQACYLVYERHSESSDITQWENPDDIDSFLNHFKQHSLRNPIVEQVVTETLRTVRDIWKYYGNGSPNYFNEIHIELGREMKNPADKRKQMSAKINENENTNQRIKGILQELMNDGVQDIKPYSPSQQEILKIYEEGISQNPNVDYSKVSEDEITKIKKSNNPTLKEIQRYKLWLEQKYISPYTGKPIPLSELFTPAYQIEHIIPQSRYFDNSLSNKIICESEVNEDKSNKTAYEYLKTNGGSIVHGHHLLSLKEYEDHCQHYFKKNRTKLKNLLSEEIPEGFINRQLNDSRYISKLIKGLLSNIVREENEQEATSKNIVPVTGSITSKLKQDWGLNDKWNEIIAPRFKRLNKMTNSNDFGYFDEKINTFRIQVPDAISRGFNKKRIDHRHHTLDALVIACCTKKHIQYLNSLNNEIIKHELKPSILIKNAQGDYTKHFMLPWNNFPIDCKNAIENTIVSFKQNLRVINKTSNKYQSYKDENGNLRLGKDGKPKKGLTKQTKGNNWAVRKAMHEDTFYGEIVDGENKGKLKIKTLLDTSFDVKKIEDKVLDKSIRTILINYLKQDKYKNLSKPHEEAFSPNGIIEMNKNIISLNNNIPHKPIKRVTLKHEKGKKFSIKTLLDKKTKFAKSATGTNVFFCIYKNINGKIKYHTPSFEEIIEIQKQEFEIKYKSKLNVPETLFDKKESFELLFYLQPNDLVYLPNDEELKNRQLIDFNNLNKKQIKRIYKFTDGSGTTANFIPYQVAKVIFNLNKKEQAKSSFKYPIQNEFGVGSPQSKNQKSIEGILIKERCIKLKIDRLGNISKA

SEQ ID NO: 441 - protein, 1629 aa, Francisella cf.
MNFKILPIAIDLGVKNTGVFSAFYQKGTSLERLDNKNGKVYELSKDSYTLLMNNRTARRHQRRGIDRKQLVKRLFKLIWTEQLNLEWDKDTQQAISFLFNRRGFSFITDGYSPEYLNIVPEQVKAILMDIFDDYNGEDDLDSYLKLATEQESKISEIYNKLMQKILEFKLRKLCTDIKDDKVSTKTLKEITSYEFELLADYLANYSEILKTQKFSYTDKQGNLKELSYYHHDKYNIQEFLKRHATINIQILDTLLTDDLDIWNFNFEKFDFDKNEEKLQNQEDKDHIQAHLHHFVFAVNKIKSEMASGGRHRSQYFQEITNVLDENNHQEGYLKNFCENLHNKKYSNLSVKNLVNLIGNLSNLELKPLRKYFNDKIHAKADHWDEQKFTETYCHWILGEWRVGVKDQDKKDGAKYSYKDLCNELKQKVTKAGLVDFLLELDPCRTIPPYLDNNNRKPPKCQSLILNPKFLDNQYPNWQQYLQELKKLQSIQNYLESFETDLKVLKSSKDQPYFVEYRSSNQQIASGQRDYKDLDARILQFIFDRVKASDELLLNEIYFQAKKLKQKASSELEKLESSKKLDEVIANSQLSQILKSQHTNGIFEQGTFLHLVCKYYKQRQRARDSRLYIMPEYRYDKKLHKYNNTGRFDDDNQLLTYCNHKPRQKRYQLLNDLAGVLQVSPNFLKDKIGSDDDLFISKWLVEHIRGFKKACEDSLKIQKDNRGLLNHKINIARNTKGKCEKEIFNLICKIEGSEDKKGNYKHGLAYELGVLLFGEPNEASKPEFDRKIKKFNSIYSFAQIQQIAFAERKGNANTCAVCSADNAHRMQQIKITEPVEDNKDKIILSAKAQRLPAITTRIVDGAVKKMATILAKNIVDDNWQNIKQVLSAKHQLHIPIITESNAFEFEPALADVKGKSLKDRRKKALERISPENIFKDKNNRIKEFAKGISAYSGANLTDGDFDGAKEELDHIIPRSHKKYGTLNDEANLICVTRGDNKNKGNRIFCLRDLANNYKLKQFETTDDLEIEKKIADTIWDANKKDFKFGNYRSFINLTPQEQKAFRHALFLADENPIKQAVIRAINNRNRTFVNGTQRYFAEVLANNIYLRAKKENLNTDKISFDYFGIPTIGNGRGIAEIRQLYEKVDSDIQAYAKGDKPQASYSHLIDAMLAFCIAADEHRNDGSIGLEIDKNYSLYPLDKNTGEVFTKDIFSQIKITDNEFSDKKLVRKKATEGFNTHRQMTRDGIYAENYLPILIHKELDEVRKGYTWKNSEEIKIFKGKKYDIQQLNNLLYCLKFVDKPISIDIQISTLEELRNILTTNNIAATAEYYYINLKTQKLHEYYIENYNTALGYKKYTKEMEFLRSLAYRSERVKIKSIDDVKQVLDKDSNFIIGKITLPFKKEWQRLYREWQNITIKDDYEFLKSFFNVKSITKLHKKVRKDFSLPISTNEGKFLVKRKTWDNNFIYQILNDSDSRVDGTKPFIPAFDISKNEIVEAIIDSFTSKNIFWLPKNIELQKVDNKNIFAIDTSKWFEVETPSDLRDIGVATIQYKIDNNSRPKVRVKLDYVIDDDSKINYFTNHSLLKSRYPDKVLEILKQSTIIEFESSGFNKTIKEMLGMTLAGIYNETSNN

SEQ ID NO: 442 - protein, 1646 aa, Francisella cf.
MNIKILPIAIDLGAKNTGVFSAFYQKGTSLESLDNKNGKVYELSKDSYTLLMNNRTARRHQRRGIDRKQLVKRLFKLIWTKQLNLEWNKDTQQTISFLLNRRGFSFITDGYSPEYLNIAPEAVKAILMSILDDYNGEDDLDSYLQSATENDSKIDELYNKLLQKALEFKLRKLCIDIKEDKVTTKTLKELSNTEFKLLANYLVDYDRILRTQKFSYTDKQGNLRELNYYHHDKYNIQEFLKRNIIINDVILEKLTDDLDIWNLNFDKFDFEKNLEKLENQEDKDYLQTHLHHFVFAVNKIKSEMASGGRHRSQYFQEITNVLVENNHQEGYLKNFCENLHNKKYSNLSVKNLVNLIGNLSNLELKPLRKYFNDKIHAKADYWDEQKFAETYSDWILGEWRVGAKDKDKKDGAKYSYKNLCDELKQKVGINQDGIINQTKSDFVDFLLELDPCRTIPPYLDNNNRKPPKCQSLILNPKFLDNKYPNWQQYLQELKKLQTVQNYLGNFEIDLKDLKSSKEQPYFVKYKSLNQQIASGQRDYKDLDARVLQFIFDRVKASDELLLNEIYSHAKKLKQNTSSELEKLELCKKLDEVIANSQLSQILKSQHVNGIFEQGTFLHLVCKYYKQRQRARDSRLYIMPEYRYDKKLDKYNNTGRFDDDNQLLTYCNHKPRQKRYQLLNDLAGVLQVSPNFLKDKIGSDDDLFISKWLVEHIRGFKKACEDSLKIQKDNRGLLNHKINIARNTKGKCEKEIFNLICKIEGSEDKKGNYKHGLAYELGVLLFGEPNQASKLEFDRKIKKFNSIYSFAQIQQIAFAERKGNANTCAVCSADNAHRMQQIKVAKPVEGNKDNIILSAKAQRLPAIPTRIVDGAVKKIATILARNIVDDNWDNIKQALSNNQQLHVPIITESNAFEFEPALADIKGKSLKDKRKKALERIDPENVFKDKNNRIKEFAKGISAYSDANLANGDFDGAKEELDHIIPRSHKKYGTLNDEANLICVTREDNQNRGNKAVFLYDLKPNYKLKQFNTTDDLEIEKKIADTIWDASKQDFKFGNYRSFINLTPQEQIAFRHALFLADKNPIKKAVIRAIDNRNRTFVNGTQRYFAEVLANNIYLRAKKENLATNRITFDYFGIETTNSNGRGIADVRKLYEKVDSDIQAYAKGDKPQDSYSHLIDAMIAFCVAADEHKNEGSIGLKMGNQYGLFPTPDKYDENTGEIISWHNDDIFRKIKVSDNQFSDKKLVRKKATEGFNTHRQMTRDGIYGESYLPILIHKNLNEVRKGYNWENSEEIKIFKGKKYDIQQLNNLVYCLKFVDKPISIDIQITTLEELRNILETNNISTTAEYYYINLKTQKLHEYYIENYNTALGYKKYTKEMEFLRSLAYRTERVKIKSIDDVSMILAKDSNFKAGKIELPFKTEWQRLYLEWQNTTIKDNHEFLKSYFSVKNATKQHKKVRKDFSLPISTNEGKLLVKRKTWDNNFIYQILNDSDSRADGTKPFIPAFDISKNEIVETIIKSFTSKNIFWLPKNIELQKVDNKSIFAIDTSRWFEVETPKDLIEIGVSTIQYKIDNNSRPKVRVKLDYVMDDDSKINYFMNHSLLKSRYPDKVLEILKQSTIIEFESSGFNKTIKEMLGMTLAGIYNETSNN

SEQ ID NO: 443 - protein, 1629 aa, Francisella novicida
MNFKILPIAIDLGVKNTGVFSAFYQKGTSLERLDNKNGKVYELSKDSYTLLMNNRTARRHQRRGIDRKQLVKKLFKLIWTEQLNLEWDKDTQQAISFLFNRRGFSFITDGYSPEYLNIVPEQVKAILMDIFDDYNGEDDLDSYLKLATEQESKISEIYNKLMQKILEFKLRKLCTDIKDDKVSTKTLKEITSYEFELLADYLANYSESLKTQKFSYTDKQGNLKELSYYHHDKYNIQEFLKRHATINDEILDTLLTDDLDIWNFNFEKFDFDKNEEKLQNQEDKDHTQAHLHHFVFAVNKIKSEMASGGRHRGQYFQEITNVLDENNHQEGYLKNFCENLHNKKYSNLSVKNLVNLIGNLSNLELKPLRKYFNDKIHAKADHWDEQKFTETYCHWILGEWRVGLKDQDKKEGAKYSYKDLCNELKQKVTNAGLIDFLLELDPCRTIPPYLDNNNRKPPKCQSLILNPKFLDNQYPNWQQYLQELKKLQIIQDYLESFETDLKVLKSSKDQPYFVEYKSSNQQIASGQRDYKDLDARILQFIFDRVKASDELLLNEIYFQAKKLKQKASSELEKLESSKKLDEVIANSQLSKILKSQHTNGIFEQGTFLHLVCKYYKQRQRARDSRLYIMPEYRYDKKLDKYNNTGRFDDDNQLLTYCNHKPRQKRYQLLNDLAGVLQVSPNFLKDKIGSDDDLFISKWLVEHIRGFKKACEDSLKIQKDNRGLLNHKINIARNTKGKCEKEIFNLICKIEGSEDKKGNYKHGLAYELGVLLFGEPNEASKPEFDRKIKKFNSIYSFAQIQQIAFAERKGNANTCAVCSADNAHRMQQIKITEPVEDNKDKIILSAKAQRLPAIPTRIVDGAVKKMATILAKNIVDDNWQNIKQVLSAKHQLHIPIITESNAFEFEPALADVKGKSLKDRRKKALERISPENIFKDKNNRIKEFAKGISAYSGANLTDGDFDGAKEELDHIIPRSHKKYGTLNDEANLICVTRDDNKNKGNRIFCLHDLANNYKLKQFETTDDLEIEKKIADTIWDASKKDFKFGNYRSFINLTPQEQKAFRHALFLADENPIKQAVIRAINNRNRTFVNGTQRYFAEVLANNIYLRAKKENLNTDKISFDYFGIPTIGNGRGIAEIRQLYEKVDSDIQVYAKGDKPQASYSHLIDAMLAFCIAADEHRNDGSIGLEIDKNYSLYPLDKNTGEVFTKDIFSQIKITDNEFSDKKLVRKKATEGFNTHRQMTRDGIYAENYLPILIHKELDEVRKGYTWKNSEEIKIFKGKKYDIQQLNNLLYCLKFVDKPISIDIQISTLEELRNILTTNNIAATAEYYYINLKTQKLHEYYIENYNTALGYKKYTKEMEFLRSLAYRSERVKIKSIDDVKQVLDKDSNFIIGKITLPFKKEWQRLYREWQNTTIKDDYEFLKSFFNVKSITKLHKKVRKDFSLPISTNEGKFLVKRKTWDNNFIYQILNDSDSRVDGTKPFIPAFDISKNEIVEAIIDSFTSKNIFWLPKNIELQKVDNKNIFAIDTSKWFEVETPSDLRDIGVATIQYKIDNNSRPKVRVKLDYVIDDDSKINYFTNHSLLKSRYPDKVLEILKQSTIIEFESSGFNKTIKEMLGMTLAGIYNETSNN

SEQ ID NO: 444 - protein, 1629 aa, Francisella novicida
MNFKILPIAIDLGVKNTGVFSAFYQKGTSLERLDNKNGKVYELSKDSYTLLMNNRTARRHQRRGIDRKQLVKRLFKLIWTEQLNLEWDKDTQQAISFLFNRRGFSFITDGYSPEYLNIVPEQVKAILMDIFDDYNGEDDLDSYLKLATEQESKISEIYNKLMQKILEFKLMKLCTDIKDDKVSTKTLKEITSYEFELLADYLANYSESLKTQKFSYTDKQGNLKELSYYHHDKYNIQEFLKRHATINDRILDTLLTDDLDIWNFNFEKFDFDKNEEKLQNQEDKDHIQAHLHHFVFAVNKIKSEMASGGRHRSQYFQEITNVLDENNHQEGYLKNFCENLHNKKYSNLSVKNLVNLIGNLSNLELKPLRKYFNDKIHAKADHWDEQKFTETYCHWILGEWRVGVKDQDKKDGAKYSYKDLCNELKQKVTKAGLVDFLLELDPCRTIPPYLDNNNRKPPKCQSLILNPKFLDNQYPNWQQYLQELKKLQSIQNYLDSFETDLKVLKSSKDQPYFVEYKSSNQQIASGQRDYKDLDARILQFIFDRVKASDELLLNEIYFQAKKLKQKASSELEKLESSKKLDEVIANSQLSQILKSQHTNGIFEQGTFLHLVCKYYKQRQRARDSRLYIMPEYRYDKKLHKYNNTGRFDDDNQLLTYCNHKPRQKRYQLLNDLAGVLQVSPNFLKDKIGSDDDLFISKWLVEHIRGFKKACEDSLKIQKDNRGLLNHKINIARNTKGKCEKEIFNLICKIEGSEDKKGNYKHGLAYELGVLLFGEPNEASKPEFDRKIKKFNSIYSFAQIQQIAFAERKGNANTCAVCSADNAHRMQQIKITEPVEDNKDKIILSAKAQRLPAIPTRIVDGAVKKMATILAKNIVDDNWQNIKQVLSAKHQLHIPIITESNAFEFEPALADVKGKSLKDRRKKALERISPENIFKDKNNRIKEFAKGISAYSGANLTDGDFDGAKEELDHIIPRSHKKYGTLNDEANLICVTRGDNKNKGNRIFCLRDLADNYKLKQFETTDDLEIEKKIADTIWDANKKDFKFGNYRSFINLTPQEQKAFRHALFLADENPIKQAVIRAINNRNRTFVNGTQRYFAEVLANNIYLRAKKENLNTDKISFDYFGIPTIGNGRGIAEIRQLYEKVDSDIQAYAKGDKPQASYSHLIDAMLAFCIAADEHRNDGSIGLEIDKNYSLYPLDKNTGEVFTKDIFSQIKITDNEFSDKKLVRKKAIEGFNTHRQMTRDGIYAENYLPILIHKELNEVRKGYTWKNSEEIKIFKGKKYDIQQLNNLVYCLKFVDKPISIDIQISTLEELRNILTTNNIAATAEYYYINLKTQKLHEYYIENYNTALGYKKYSKEMEFLRSLAYRSERVKIKSIDDVKQVLDKDSNFIIGKITLPFKKEWQRLYREWQNTTIKDDYEFLKSFFNVKSITKLHKKVRKDFSLPISTNEGKFLVKRKTWDNNFIYQILNDSDSRVDGTKPFIPAFDISKNEIVEAIIDSFTSKNIFWLPKNIELQKVDNKNIFAIDTSKWFEVETPSDLRDIGVATIQYKIDNNSRPKVRVKLDYVIDDDSKINYFTNHSLLKSRYPDKVLEILKQSTTIEFESSGFNKTIKEMLGMTLAGIYNETSNN

SEQ ID NO: 445 - protein, 244 aa, Francisella tularensis
ARKQNSEIYNKLMQKILEFKLRKLCTDIKDDKVSTKTLKEITSYEFELLADYLANYSESLKTQKFSYTDKQGNLKELSYYHHDKYNIQEFLKRHATINDEILDTLLTDDFDIWNFNFEKFDFDKNEEKLQNQEDKDHTQAYLHHFVFAVNKIKSEMASGGRHRSQYFQEITNVLDENNHQEGYLKNFCENLHNKKYSNLSVKNLVNLVGNLSNLELKPLRKYFNDKNLIIGMSKSLQKLIATGY

SEQ ID NO: 446 - protein, 501 aa, Francisella tularensis
MEIEKKIADTIWDASKQDFKFGNYRSFINLTPQEQKAFRYALFLADENSIKQAVIRAINNRNRTFVNGTQRYFAEVLANNIYLRAKKENLNTDKISFDYFGIPTIGNGRGIADIRQLYEKVDSDIQAYAKGDKPQASYSHLIDAMIAFCVAADEHRNDGSIGLEIDKNYSLYLLDKNTGEVFTKDIFSQIKITDNEFSDKKLVRKKATEGFNTHRQMTRDGIYAENYLPILIHKELDEVRKGYTWGNSEELKIHKGKKYNIQQLNNIVYCLKFIDKSISIDIQISTLEELRNILTTNNIAATAEYYYINLKNQKLHEYYIENYNTALDYKKYSKEMEFLRSLAYRSERVKIKSIDDVKQVLDKDSNFIIGKITLPFKKEWQRLYLEWQNTTIKDDYEFLKSFFNVKSITKLHKKVRKDFSLPISTNEGKFLVKRKTWDNNFIYQILNDSDSRVDGTKPFIPAFDISKNEIVEAIIDSFTSKNIFWLPKNIELQNVDKIFLL

SEQ ID NO: 447 - protein, 158 aa, Francisella tularensis
MIDFLLELDPCITIPPYLDNNNRKPPKCQSLILNPKFLDNQYPNWQQYLQELKKLQSIQDYLDSFETDLKDLKSSKDQPYFVEYKSSNQQMASGQRDYKDLDARILQFIFDRVKASDELLLNEIYFQAKKLKQKASSELEKLESSKKLDEVIANSQLS

SEQ ID NO: 448 - protein, 878 aa, Francisella tularensis
MLNDLAGVLQVSRNQLLSSVEEWFQQAQRVGEISKSQDEQIFEWLKSFKIASYCKAAVEMQKQYRGTLKNAIQTAIFRQSENINKNKNKNKNTGNQQQALSENSKDVKSLTADEKKLLKLIENIAKASQKIGESLGLNDKQIKKFNSIYNFAQIQQIAFAERKGNANTCAVYSADNAHRMQQIKITELVEDNKDNIILSAKAQRLPAIPTRIVDGAVKKMATILAKNIVDDNWQNIKQVLSAKHQLHIPIITESNAFEFEPALADVKGKSLKDRRKKALERISPENIFKDKNNRIKEFAKGISAYSGANLTDGDFDGAKEELDHIIPRSYKKYGTLNDEVNLICVTRDDNKNKGKRIFCLNDLANNYKLKQFETTDDLEIEKKIADTIWDASKQDFKFGNYRSFINLIPQEQKAFRYALFLADENSIKQAVIRAINNRNRTFVNGTQRYFAEVLANNIYLRAKKENLNTDKISFDYFGIPTIGNGRGIADIRQLYEKVDSDIQAYAKGDKPQASYSHLIDAMIAFCVAADEHRNDGSIGLEIDKNYSLYPLDKNTGEVFTKDIFSQIKITDNEFSDKKLVRKKATEGFNTHRQMTRDGIYAENYLPILIHKELDEVRKGYTWGNSEELKIHKGKKYNIQQLNNIVYCLKFIDKSISIDIQISTLEELRNILTTNNIAATAEYYYINLKNQKLHEYYIENYNTALDYKKYSKEMEFLRSLAYRSERVKIKSIDDVKQVLDKDSNFIIGKITLPFKKEWQRLYLEWQNTTIKDDYEFLKSFFNVKSINKLHKKVRKDFSLPISTNEGKFLVKRKTWDNNFIYQILNDSDSRVDGTKPFIPAFDISKNEIVEAIIDSFTSKNIFWLPKNIELQKVDKIFLL

SEQ ID NO: 449 - protein, 292 aa, Francisella tularensis
MLNDLAGVLQVSRNQLLSSVEEWFQQAQRVGEISKSQDEQIFEWLKSFKIASYCKAAVEMQKQYRGTLKNAIQTAIFRQSENINKNKNKNTGNQQQALSENSKDVKSLTADEKKLLKLIENIAKASQKIGESLGLNDKQIKKFNSIYNFAQIQQIAFAERKGNANTCAVYSADNAHRMQQIKITELVEDNKDNIILSAKAQRLPAIPTRIVDGAVKKMVTILAKNIVDDNWQNIKQVLSAKHQLHIPIITESNAFEFEPALADVKGKSLKDRRKKALERISPENIFKDKNIC

SEQ ID NO: 450 - protein, 53 aa, Francisella tularensis
MNHSLLKSRYPDKVLEILKQSTIIEFESSGFNKTIKEMLGMTLAGIYNETSNN

SEQ ID NO: 451 - protein, 393 aa, Francisella tularensis
MNVKILPIAIDLDVKNTGVFSAFYQKGTSLEKLDNKNGKVYELSKDSYTLLMNNRTAQRHQRRGIDRKQLVKRLFKLVWTEQLNLEWDKDTQQAISFLFNRRGFSFITDGYSTEYLNIVPEQVKAILMDIFDDYNGEDDLDSYLKLATEQESKISEIYNKLMQKILEFKLRKLCTDIKDDKVSTKTLKEITSYEFELLADYLANYSESLKTQKFSYTDKQGNLKELSYYHHDKYNIQEFLKRHATINDEILDTLLTDDFDIWNFNFEKFDFDKNEEKLQNQEDKDHTQAYLHHFVFAVNKIKSEMASGGRHRSQYFQEITNVLDENNHQEGYLKNFCENLHNKKYSNLSVKNLVNLVGNLSNLELKPLRKYFNDKNLIIGMSKSLQKLIATGY

SEQ ID NO: 452 - protein, 1629 aa, Francisella tularensis
MNVKILPIAIDLGVKNTGVFSAFYQKGTSLERLDNKNGKVYELSKDSYTLLMNNRTARRHQRRGIDRKQLVKRLFKLIWTEQLNLEWDKDTQQAISFLFNRRGFSFITDGYSPEYLNIVPEQVKAILMDIFDDYNGEDDLDSYLKLATEQESKISEIYNKLMQKILEFKLRKLCTDIKDDKVSTKTLKEITSYEFELLADYLANYSEILKTQKFSYTDKQGNLKELSYYHHDKYNIQEFLKRHATINDEILDTLLTDDLDIWNFNFEKFDFDKNEEKLQNQEDKDHTQAHLHHFVFAVNKIKSEMASGGRHRGQYFQEITNVLDENNHQEGYLKNFCENLHNKKYSNLSVKNLVNLIGNLSNLELKPLRKYFNDKIHAKADHWDEQKFTETYCHWILGEWRVGVKDQDKKDGAKYSYKDLCNELKQKVTKAGLVDFLLELDPCRTIPPYLDNNNRKPPKCQSLILNPKFLDNQYPNWQQYLQELKKLQSIQNYLESFETDLKVLKSSKDQPYFVEYKSSNQQIASGQRDYKDLDARILQFIFDRVKASDELLLNEIYFQAKKLKQKASSELEKLESSKKLDEVIANSQLSQILKSQHTNGIFEQGTFLHLVCKYYKQRQRARDSRLYIMPEYRYDKKLDKYNNTGRFDDDNQLLTYCNHKPRQKRYQLLNDLAGVLQVSPNFLKDKIGSDDDLFISKWLVEHIRGFKKACEDSLKIQKDNRGLLNHKINIARNTKGKCEKEIFNLICKIEGSEDKKGNYKHGLAYELGVLLFGEPNEASKPEFDRKIKKFNSIYSFAQIQQIAFAERKGNANTCAVCSADNAHRMQQIKITEPVEDNKDKIILSAKAQRLPAIPTRIVDGAVKKMATILAKNIVDDNWQNIKQVLSAKHQLHIPIITESNAFEFEPALADVKGKSIKDRRKKALERISPENIFKDKNNRIKEFAKGISAYSGDNLASGDFDGAKEELDHIIPRSHKKYGTLNDEANLICVTRDDNKNKGNRIFCLHDLANNYKLKQFETTDDLEIEKKIADTIWDASKKDFKFGNYRSFINLTPQEQKAFRHALFLADENPIKQAVIRAINNRNRTFVNGTQRYFAEVLANNIYLRAKKENLNTDKISFDYFGIPTIGNGRGIVEIRQLYEKVDSDIQAYAKGDKPQASYSHLIDAMLAFCIAADEHRNDGSIGLEIDKNYSLYPLDKNTGEVFTKDIFSQIKITNNEFSDKKLVRKKATEGFNTHRQMTRDGIYAENYLPILIHKELDEVRKGYTWGNSEELKIHKGKKYDIQQLNNLVYCLKFIDKSISIDIQISTLEELRNILTTNNIATTAEYYYINLKTQKLHEYYIENYNTALGYKKYTKEMEFLRSLAYRSERVKIKSIDDVKQVLDKDSNFIIGKITLPFKKEWQRLYREWQNTTIKDDYEFLKSFFNVKSITKLHKKVRKDFSLPISTNEGKFLVKRKTWDNNFIYQILNDSDSRVDGTKPFIPAFDISKNEIVEAIIDSFTSKNIFWLPKNIELQKVDNKNIFAIDTSKWFEVETPSDLRDIGVATIQYKIDNNSRPKVRVKLDYVIDDDSKINYFTNHSLLKSRYPDKVLEILKQSTIIEFESSGFNKTIKEMLGMTLAGIYNETSNN

SEQ ID NO: 453 - protein, 285 aa, Francisella tularensis
MTRDGIYAENYLPILIHKELDEVRKGYTWGNSEELKIHKGKKYNIQQLNNIVYCLKFIDKSISIDIQISTLEELRNILTTNNIAATAEYYYINLKNQKLHEYYIENYNTALDYKKYSKEMEFLRSLAYRSERVKIKSIDDVKQVLDKDSNFIIGKITLPFKKEWQRLYLEWQNTTIKDDYEFLKSFFNVKSITKLHKKVRKDFSLPISTNEGKFLVKRKTWDNNFIYQILNDSDSRVDGTKPFIPAFDISKNEIVEAIIDSFTSKNIFWLPKNIELQKVDKIFLL

SEQ ID NO: 454 - protein, 1323 aa, Fructobacillus fructosus
MVYDVGLDIGTGSVGWVALDENGKLARAKGKNLVGVRLFDTAQTAADRRGFRTTRRRLSRRKWRLRLLDELFSAEINEIDSSFFQRLKYSYVHPKDEENKAHYYGGYLFPTEEETKKFHRSYPTIYHLRQELMAQPNKRFDIREIYLAIHHLVKYRGHFLSSQEKITIGSTYNPEDLANAIEVYADEKGLSWELNNPEQLTEIISGEAGYGLNKSMKADEALKLFEFDNNQDKVAIKTLLAGLTGNQIDFAKLFGKDISDKDEAKLWKLKLDDEALEEKSQTILSQLTDEEIELFHAVVQAYDGFVLIGLLNGADSVSAAMVQLYDQHREDRKLLKSLAQKAGLKHKRFSEIYEQLALATDEATIKNGISTARELVEESNLSKEVKEDTLRRLDENEFLPKQRTKANSVIPHQLHLAELQKILQNQGQYYPFLLDTFEKEDGQDNKIEELLRFRIPYYVGPLVTKKDVEHAGGDADNHWVERNEGFEKSRVTPWNFDKVFNRDKAARDFIERLTGNDTYLIGEKTLPQNSLRYQLFTVLNELNNVRVNGKKFDSKTKADLINDLFKARKTVSLSALKDYLKAQGKGDVTITGLADESKFNSSLSSYNDLKKTFDAEYLENEDNQETLEKIIEIQTVFEDSKIASRELSKLPLDDDQVKKLSQTHYTGWGRLSEKLLDSKIIDERGQKVSILDKLKSTSQNFMSIINNDKYGVQAWITEQNTGSSKLTFDEKVNELTTSPANKRGIKQSFAVLNDIKKAMKEEPRRVYLEFAREDQTSVRSVPRYNQLKEKYQSKSLSEEAKVLKKTLDGNKNKMSDDRYFLYFQQQGKDMYTGRPINFERLSQDYDIDHIIPQAFTKDDSLDNRVLVSRPENARKSDSFAYTDEVQKQDGSLWTSLLKSGFINRKKYERLTKAGKYLDGQKTGFIARQLVETRQIIKNVASLIEGEYENSKAVAIRSEITADMRLLVGIKKHREINSFHHAFDALLITAAGQYMQNRYPDRDSTNVYNEFDRYTNDYLKNLRQLSSRDEVRRLKSFGFVVGTMRKGNEDWSEENTSYLRKVMMFKNILTTKKTEKDRGPLNKETIFSPKSGKKLIPLNSKRSDTALYGGYSNVYSAYMTLVRANGKNLLIKIPISIANQIEVGNLKINDYIVNNPAIKKFEKILISKLPLGQLVNEDGNLIYLASNEYRHNAKQLWLSTTDADKIASISENSSDEELLEAYDILTSENVKNRFPFFKKDIDKLSQVRDEFLDSDKRIAVIQTILRGLQIDAAYQAPVKIISKKVSDWHKLQQSGGIKLSDNSEMIYQSATGIFETRVKISDLL

SEQ ID NO: 455 - protein, 1367 aa, Fusobacterium sp.
MKKQKFSDYYLGFDIGTNSVGWCVTDLDYNVLRFNKKDMWGSRLFDEAKTAAERRVQRNSRRRLKRRKWRLNLLEEIFSDEIMKIDSNFFRRLKESSLWLEDKNSKEKFTLFNDDNYKDYDFYKQYPTIFHLRDELIKNPEKKDIRLIYLALHSIFKSRGHFLFEGQNLKEIKNFETLYNNLISFLEDNGINKSIDKDNIKKLEKIICDSGKGLKDKEKEFKEIFNSDKQLVAIFKLSVGSSVSLNDLFDTDEYKKEEVEKEKISFREQIYEDDKPIYYSILGEKIELLDIAKSFYDFMVLNNILSDSNYISEAKVKLYEEHKKDLKNLKYIIRKYNKENYDKLFKDKNENNYPAYIGLNKEKGKKEVVEKSGLKIDDLIKVIKGYLPKPERIEEKDKTIFNEILNKIELKTILPKQRISDNGTLPYQIHEVELEKILENQSKYYDFLNYEENGVSTKDKLLKTFKFRIPYYVGPLNSYHKDKGGNSWIVRKEEGKILPWNFEQKVDIEKSAEEFIKRMTNKCTYLNGEDVIPKDSFLYSEYIILNELNKVQVNDEFLNEENKRKIIDELFKENKKVSEKKFKEYLLVNQIANRTVELKGIKDSFNSNYVSYIKFKDIFGEKLNLDIYKEISEKSILWKCLYGDDKKIFEKKIKNEYGDILNKDEIKKINSFKFNTWGRLSEKLLTGIEFINLETGECYSSVMEALRRTNYNLMELLSSKFTLQESIDNGNKEMNEVSYRDLIEESYVSPSLKRAILQTLKIYEEIKKITGRVPKKVFIEMARGGDETMKNKKIPARQEQLKKLYDSCGNDIANFSIDIKKMKSSLSSYDNNSLRQKKLYLYYLQFGKCMYTGREIDLDRLLQNNDTYDIDHIYPRSKVIKDDSFDNLVLVLKNENAEKSNEYPVKKEIQEKMKSFWRFLKEKNFISDEKYKRLTGKDDFELRGFMARQLVNVRQTTKEVGKILQQIEPEIKIVYSKAEIASSFREMFDFIKVRELNDTHHAKDAYLNIVAGNVYNTKFTEKPYRYLQEIKENYDVKKIYNYDIKNAWDKENSLEIVKKNMKKNTVNITRFIKEEKGQLFDLNPIKKGETSNEIISIKPKLYNGKEEKLNEKYGYYKSLNPAYFLYVEHKEKNKRIKSFERVNLVDVNNIKDEKSLVKYLIENKKLVEPRLIKKVYKRQVILINDYPYSIVALDSNKLMDFENLKPLFLENKYEKILKNVIKFLEDNQGKSEENYKFIYLKKKDRYEKNETLESVKDRYNLEFNEMYDKFLEKLDSKDYKNYINNKKYKNLLDVKEKFIKLNLFDKAFTLKSFLDLFNRKTMADFSKVGLTKYLGKIQKISSNVLSKNELYLLEESVTGLFVKKIKL

SEQ ID NO: 456 - protein, 1367 aa, Fusobacterium sp.
MKKQKFSDYYLGFDIGTNSVGWCVTDLDYNVLRFNKKDMWGSRLFDEAKTAAERRVQRNSRRRLKRRKWRLNLLEEIFSDEIMKIDSNFFRRLKESSLWLEDKNSKEKFTLFNDDNYKDYDFYKQYPTIFHLRDELIKNPEKKDIRLIYLALHSIFKSRGHFLFEGQNLKEIKNFETLYNNLISFLEDNGINKSIDKDNIKKLEKIICDSGKGLKDKEKEFKEIFNSDKQLVAIFKLSVGSSVSLNDLFDTDEYKKEEVEKEKISFREQIYEDDKPIYYSILGEKIELLDIAKSFYDFMVLNNILSDSNYISEAKVKLYEEHKKDLKNLKYIIRKYNKENYDKLFKDKNENNYPAYIGLNKEKGKKEVVEKSGLKIDDLIKVIKGYLPKPERIEEKDKIIFNEILNKIELKTILPKQRISDNGTLPYQIHEVELEKILENQSKYYDFLNYEENGVSTKDKLLKTFKFRIPYYVGPLNSYHKDKGGNSWIVRKEEGKILPWNFEQKVDIEKSAEEFIKRMTNKCTYLNGEDVIPKDSFLYSEYIILNELNKVQVNDEFLNEENKRKIIDELFKENKKVSEKKFKEYLLVNQIANRTVELKGIKDSFNSNYVSYIKFKDIFGEKLNLDIYKEISEKSILWKCLYGDDKKIFEKKIKNEYGDILNKDEIKKINSFKFNTWGRLSEKLLTGIEFINLETGECYSSVMEALRRTNYNLMELLSSKFTLQESIDNGNKEMNEVSYRDLIEESYVSPSLKRAILQTLKIYEEIKKITGRVPKKVFIEMARGGDETMKNKKIPARQEQLKKLYDSCGNDIANFSIDIKKMKSSLSSYDNNSLRQKKLYLYYLQFGKCMYTGREIDLDRLLQNNDTYDIDHIYPRSKVIKDDSFDNLVLVLKNENAEKSNEYPVKKEIQEKMKSFWRFLKEKNFISDEKYKRLTGKDDFELRGFMARQLVNVRQTTKEVGKILQQIEPEIKIVYSKAEIASSFREMFDFIKVRELNDTHHAKDAYLNIVAGNVYNTKFTEKPYRYLQEIKENYDVKKIYNYDIKNAWDKENSLEIVKKNMKKNTVNITRFIKEEKGQLFDLNPIKKGETSNEIISIKPKLYNGKEEKLNEKYGYYKSLNPAYFLYVEHKEKNKRIKSFERVNLVDVNNIKDEKSLVKYLIENKKLVEPRLIKKVYKRQVILINDYPYSIVALDSNKLMDFENLKPLFLENKYEKILKNVIKFLEDNQGKSEENYKFIYLKKKDRYEKNETLESVKDRYNLEFNEMYDKFLEKLDSKDYKNYINNKKYKNLLDVKEKFIKLNLFDKAFTLKSFLDLFNRKTMADFSKVGLTKYLGKIQKISSNVLSKNELYLLEESVTGLFVKKIKL

SEQ ID NO: 457 - protein, 1367 aa, Fusobacterium sp.
MKKQQFSDYYLGFDIGTNSVGWCVTDFNYNVLRFNKKDMWGSRLFDEAKTAAERRVQRNSRRRLKRRKWRLNLLEEIFSDEILKIDSNFFRRLKESSLWLEDKSSKEKFTLFNDDNYKDYDFYKQYPTIFHLRNELIKNPEKKDIRLVYLALHSIFKSRGHFLFEGQNLKDIKNFETLYNNLMAFLEDNDIYKNIDSSYIGNLENIICDSKKGLKDKEKEFKEIFNSDKQLVGFFKLSVGSSVSLNDLFDTDEYKKGEVEKEKISFREQIYEDDKPIYYSILGEKIEFLDIAKSFYDFMVLNNILADSQYISEAKVKLYDEHKRDLKNLKYIIRKYNKENYDKLFKDKNESNYSAYIGLNKEKGKKEVIEKSRLKIDDFAKIIKGYLPKAEKIDEKDRSIFNEILDKIELKTILPKQRISDNGTLPYQIHEAELEKILENQAKYYDFLNHEENGISTKDKLLMTFKFRIPYYVGPLNSYHKNKGGNSWIVRKEEGKILPWNFEQKVDIEKSAEEFIKRMTNKCTYLNGEDVIPKDSFLYSEYIILNELNKVQVNDEFLNKEIKKKIIEDLFKKSKKISEKNFREYLLVNQITNKTVELKGVKDAFNSNYVSYIKFKDIFGDKLNLDIYKEISEKSILWKCLYGDDKKIFEKKIKSVYGDILTKDEIKKINSFKFNTWGRLSEKLLTEIEFIDLETGECYSSVMDALRRTNYNLMELLSSKFTLQENIDNENKEVSEFSYRDLVEESYVSPSLKRAILQTLKIYEEIRKITGRIPKKVFIEMARGGDETMKNKKIPARQEQLKKLYDSCGKDISNFSIDIKEMKNSLNSYDNNSLRQKKLYLYYLQFGKCMYTGKEIDLNRLLQNNDTYDIDHIYPRSKVIKDDSFDNLVLVLKNENAEKSNEYPLKKEIQEKMKSFWKFLKEKNFISDEKYKRLTGKDEFELRGFMARQLVNVRQTTKEAGKILQQIEPEIKIVYSKAEIASSFREMFDFIKVRELNDTHHAKDAYLNIVAGNVYNTKFTEKPYRYLQEIKENYDVKKIYNYDIKNAWDKEKSLEIVKKNMEKNTVNITRFIKEEKGQLFDLNPIRKGETSNEIIAIKPKFYEGSTEKLNEKYGYYKSLNPAYFIYVEHKEKNKIIRSFERVNLVDVNKIKDEKSLIKYLIENKGLIEPKVIKKVYKRQVILINNFPYSIVALDSNKLMDFENLKPLFLERKYEKILKNAIKFLEDNQGKTEEYYKFLYLKKKDRNEKNETIDSVKERYNIEFNEMYDKFLEKLDSKDYKNYINNKKYSELVNVKEKFIKLNLFDKAFTLKSFLDLFNRKTMADFSKVGLTKYLGKIQKISSNVLSKNELHLLEESVTGLFVKKIKL

SEQ ID NO: 458 - protein, 1391 aa, Galbibacter sp.
MKTILGLDLGTNSIGWALVKEAENENEVSDIIKLGVRVNPLTVDELTNFEGGKAYSNNAERTLKRGARRNLQRYKLRRENLIEILLKNGLINKDTALTEVGKETTHQTLKLRSKSANEKVSLEDLAKILLSINKKRGYKSSRKVNAEDDGVAIDGMEVAKLLYDENMTPGEYVLRLLESGKKHLPDFYRSDLQEEFNLVWKKQSEFYPLILTKELFFELHGKNKSQTWAICKEPLGIVGVKLKGSAKEQKFARYRLRKEALTQQIELEHLAIVLQDINNDSNKSSGYLGAISDRSKELFFNKETVGQYQYKQLQKDPNTSLKNQVFYRQDYLDEFEVIWRNQAKFYPQLTNELKQEIRDVVIFYQRKLKSQKNLISFCQFESTQQNYVEKETGKTKIRTIGRRVIPRSSPLFQEFKIWQSLNNLKFVNSESNQIIQFIELEDDVKKVVFDELNLRGDLKPNQVLKILSKYMKIGKLTQWKCNLEEIEGNRTNSALYNVFQMIAEEEGYGFNWGKKSALEIKSELKAIFSSIGINDSILDFDFSKKLDQQLSYQLWHLLYSAEEGNSKITEEDKFTYGNTGVALKKKLHLKFGFKPEYSTLISNLRFTSDYGNLSSKAISKILPFLRDGSDYSKACQYAGYNHSNSLSADELDNRELKPKLELLKKNSLRNPVVEKILNQMVNVVNQVIDNYGKPDEVRIELARELKKSAKERSQMTKNISDATRRNAEIKKYLSKEFGIPNPTKGDVIRYRLWEELASNGYKDLFRDKYIPKEKLFSNEIDIEHIIPKALLFDDSFSNKTLAFKVDNLKKADRTAFDFMSTDFSKDVDSYIGRIETLHKDGKISSSKYKKLMIPKSKLVDGFIERDLRNTQYIAKQARKMLLEVFKTVVPTTGKITDKLREDWDLINVMKELNFPKYKALGLTKKIERFDVGSEKIKSINVIEGWSKRNDHRHHAMDALAVAFTTHNHIQYLNYLNARKDIHHEMHGTIKSIENQIIGKDVMGKRRFIPPISDLRMKAKLQIESILISFKNKNKVVTWSVNKTKLKGKDNYNKRRQLTPRGQLHKETVYGKIKLIDPKPLKLNNKFTLVRASMIVDKVHREIVLQHLSKYDNNSEVAFDSKTIKIDPILIEGIGLKEVVCYEDVFKIRKKISGDNFKNEKHLEKVIDEKVKQILKDRVIKFQGNFKEAFSNLEENPIWLNKSKGIAVKSVAIKGVNNAESLHEGKDHFGDQILDKNKKQIPVDFVSTGNNHHVGIYEDKDGNLQERVVSFFEAVTRVNEGLPIIDKTYNSDIGWKFKFTMKQNEMFVFPSDDFDPNEFDLTDGKNAAKISPNLYRVQKIATKNYMFRHHLETVVTNDLEFTYKSIRSTGWLRNLVKVRINHLGEIVYVGEY

SEQ ID NO: 459 - protein, 1186 aa, Gardnerella vaginalis
MEGNISYAIGIDVGLNSVGLAAIRLDDYGEPIRILKAMSVIHDAGIDPNGAKESDTRKAISGVARRVRRLYRQRRRRLQKLDFLLQSLGWPVVENKDLDFSDSFIPWIFRAKLADEYIADEEQRKQMLSVAIRHIARHRGWRNPYQSIKSMMQETEYSEFYNELLKNIEKLAPGVGCEGSTPAQLVRDYLLSQQGKASRRLRITTGGRRKNHPHSLDPVLPRKLMQSDNMLEILNIFNVQHIDDKYVREQIINAVFYAESPRGSAENRVGKDAITGKGKRALKASLAFQKYRIISTISNLRIRENSKERCLTIEEKQNVYKLLTTSIDKSSKRKSAEAPLYTWIDVADCLGIERYKLRGVGSQIGDGESVGNRPPMLNSELAILYANNKSLGQSLITWWLASNRTQEDKEALIEILSNTVDIEAIHDNPEYQDKYGSAIAFIDSMNETEIAALENISLPDGRAAYSLETLDELNKQMLETDDDLFEARKKLFNLPNNWRPAEAPIAEPTGNPSVDRVLKIVHRFLISAKNRWGNPERINIEHVRSGFQSKKMANSYKELLDKRTEGKENLKAMMRNSLHLGTSDSISDADIRRYEAVQRQNGQCLYCGSEITYHTCELDHIVPRKGPGSTNTRENLVATCSSCNAQKCNTPFATWCEQSTYCKNHDISADSAINRVRAFIFPPNSYDKRGANQFKKEVIARLKQKVGDEAFDNRSIESVAWMANELHRRIDWYYNSQNYQTNNGISDISNKAQTNVGVYAGSLTAIARRMSGIDGKLEFFDGRRKTRFDRRHHAVDASVIAMMTPGIAQILAIKCNLRETQLLQGNKVVPGGIDWKEYPTANDQGYQQYANWSVRMNALLKLLNEEMRADRIAVVNSIRLRYSNSSVHQYEVNALLKLHVGDEIDSETIRRSSTPALYCALTRNPDYDVNNGFPENPGRTILLHNKKLNADDSITFFKAQAVQLFVREGSAKIGNSIHHLRIYEYFEKLKSGKIKKSYGMIRVFQNDLHRHIHEDLFSCDLPEQSISMRYADTKVAHAVQTGNANYLGYLVPGDEIIVDFSHITLSENIGKFVEFLNKIGADCTAYRHWVVVGTDTEKVLILKPSMISSEGIDKLYSNCERNNFDYSSYEKSINEILAGKGWRVSVNVLAQYKAATIRRNALGEVRWASRSHLPISWSWDTGENRE

SEQ ID NO: 460 - protein, 1186 aa, Gardnerella vaginalis
MEGNISYAIGIDVGLNSVGLAAIRLDNNGEPIRILKAMSVIHDAGIDPNGAKESDTRKAISGVARRVRRLYRQRRRRLQKLDFLLHSLGFPVVENKDLDFSDSFIPWIFRAKLADEYIADEKQRKQMLSVAIRHIARHRGWRNPYQSIKSMTQETEYSEFYNELLKNIEKFAPGVGCEGSTPAQLVRDYLLLQQGKASRRLRITTDEKRKNHPNSLNPILPRKLMQSDNMLEILNIFNVQHIDDKYVREQIINAVFYAKSPRGSAENRVGKDAITGKGKRALKASLAFQKYRIISTISNLRIRENSKERCLTIEEKQSVYKLLTTSTDESSKEKSAEAPLYTWIDVADCLGIERYKLRGVGSQIGDGESVGNRPPMLNSELAIIYANNKSLGKSLLTWWLDANRTQEDKEALIEILSNTVDIEAIHDNPEYQDKYGSAIAFIDSMDETEIAALENISLPDGRAAYSLETLDKLNKQMLETDDDLFEARKKLFNLPNNWRPSEAPIAEPTGNPSVDRVLKIVHRFLISAKNRWGNPERINIEHVRSGFKSKKMANSYKELLDKRTKGKENLKAMMRNSLHLGMSDSISDADIRRYEAVQRQNGQCLYCGSEITYHTCELDHIVPRKGPGSTNTRENLVATCSLCNAQKCNTPFSTWCEQSTYCKNHDISVDSAINRVRAFIFPPNSYDKRGANQFKKEVIARLKQKVGDEAFDNRSIESVAWMANELHRRIDWYYNSQNYQTNNGISDITNKAQTNVGVYAGSLTAIARRMSGIDGKLEFFDGRRKTRFDRRHHAVDASVIAMMTPGIAQILAIKCNLRETQLLQGNKVVPGGIDWKEYPTANDQGYQQYANWSVRMNALLKLLNEEMRADRIAVVNSIRLRYNNSSVHQYKVNALLKLHVGDEIDSGTIRRSSTPALYCALTRNPDYDVNNGLPENPNRAILLHDKKLNADDSITFFKAQAVQLFVREGSAEIGSSTHHLRIYEYFKKLKSGKIKKSYGMIRVFQNDLHRHIHEDLFSCDLPEQSISMRYADTEVAHAVQTGNSNYLGYLVPGDEIIVDFSHVKLSGNIGTFVEFLNKIGANCAAYNHWVVVGTDTEKVLILKPSMISSEGIDKLYSNCKRNNFDYSSYEKSINEILVGKGWRVSVNVLAKYNAETIRRNALGEVRWTSRSHLPISWSWNTGENRE

SEQ ID NO: 461 - protein, 1258 aa, Gemella haemolysans
MTEENPDIRKVFLAIHHILKNRGHFLLQGQSFKEGNLNNLIKELLNLDILHISIEITEENINKITEIALEKKTLTDKVNDLKKIYPKEKQLLEAFRLIFGGKTSLDKLFAIDEYKELDASVKSVSFKEKIYEEVRHDYEQVLSNYIELLDLAKLVYDSIILSDIKKEGKTLSESKVELYHKHREDLTKLKTLVKNDSKLSEDKKVELYSAIFKEDKDKGTNYVNYIRKSEEGKGCNYEDFKKFLVKELAKLEESSAKEEILRDLELELFLPLQRTKDNSVVPYQIHKEELVKILDNAAKYHKFLNEKDDSGYSIIEKVIQLLEFRIPYYVGPLNSSKKAKVDGFAWSVRNKGYENTPVTPWNYEKVIDESASAEKFITNLTNKCTYLKGEDVLPKSSLLYSEFALLNELNALKYDGNRISLEARNVIIEKLFKEQGKKVTKTSIKNLLKAEGYIDGKGEITGIDITVKNDLKSYRDFKKILGDKFNTEHVENIILWITLYGESRKLIKAKIEAVYGDIYSKEEIAKMSRLVYKDWGRFSRKLLTELVSKKLYNEETGECLNIIGAMRQNNILFMELLADRFDYSQQIIDYNKELQKEVTEITPEILDDLYVSPSVKRSIWQTVRIVEELKKIIGCAPAKIFVETTRSNQDKKKPTDSRKKQLELFYKAVKKDVKDLEKEIGSLNFDKLNERLSSVEPSKLKAKKLYLYYTQLGRCMYSGETIDITQLNTTAYDIDHIYPQSKVKDDSFTNTVLVKREYNAAKTDRYPLGSDIQTPSNRRFWKFLKEKGLITDEKYNRLVRTEEFSDEELTGFIARQLVETSQSVKAVAGILGELNPKTSICYSKAENVSSFRQNFGKIKEGNRKSDNTEQLIKVREINDYHHAKDAYLNVVVGNVYDTKFTRNVFNFIKDKKDGRKYSLNNVFYENVSNSNNVAWELNKTVHQVEKVMNNNNILVTRRTSEQKGGLFDATVYKAKVAAKAKEGVYYPLKTSDPVVNDVTKYGGFTKVKIAYYSIFEYTLVNKKGEEKITRIIPIPIYVSQNIKDDSTLLEFGKTQINIKSGEEVKDFKLKYRKLCIGDLVKINNFFNFIGGKTNDSFVYDGAVQVTLDTESERYIKTLSKYQNWKKENKDGELWESITKEKNTELYNLLVEKMNSGIFIKKKPNKFNELNSEEIRNNFSSISLEEQAKVLLEVLNLLTNKKSIFDLKSINITAARGKISFNLSNLSQFSIIEQSVAGFYEKEITIIGDKENDMENNNC

SEQ ID NO: 462 - protein, 1054 aa, Haemophilus parainfluenzae
MENKNLNYILGLDLGIASVGWAVVEIDEKENPLRLIDVGVRTFERAEVPKTGESLALSRRLARSARRLTQRRVARLKKAKRLLKSENILLSTDERLPHQVWQLRVEGLDHKLERQEWAAVLLHLIKHRGYLSQRKNESKSENKELGALLSGVDNNHKLLQQATYRSPAELAVKKFEVEEGHIRNQQGAYTHTFSRLDLLAEMELLFSRQQHFGNPFASEKLLENLTALLMWQKPALSGEAILKMLGKCTFEDEYKAAKNTYSAERFVWITKLNNLRIQENGLERALNDNERLALMEQPYDKNRLFYSQVRSILKLSDEAIFKGLRYSGEDKKAIETKAVLMEMKAYHQIRKVLEGNNLKAEWAELKANPTLLDEIGTAFSLYKTDEDISAYLAGKLSQPVLNALLENLSFDKFIQLSLKALYKLLPLMQQGLRYDEACREIYGDHYGKKTEENHHFLPQIPADEIRNPVVLRTLTQARKVINGVVRLYGSPARIHIETGREVGKSYKDRRELEKRQEENRKQRENAIKEFKEYFPHFAGEPKAKDILKMRLYKQQNAKCLYSGKPIELHRLLEKGYVEVDHALPFSRTWDDSFNNKVLVLANENQNKGNLTPFEWLDGKHNSERWRAFKALVETSAFPYAKKQRILSQKLDEKGFIERNLNDTRYVARFLCNFIADNMHLTGEGKRKVFASNGQITALLRSRWGLAKSREDNDRHHALDAVVVACSTVAMQQKITRFVRFEAGDVFTGERIDRETGEIIPLHFPTPWQFFKQEVEIRIFSDNPKLELENRLPDRPQANHEFVQPLFVSRMPTRKMTGQGHMETVKSAKRLNEGISVIKMPLTKLKLKDLELMVNREREKDLYDTLKARLEAFNDDPAKAFAEPFIKKGGAIVKSVRVEQIQKSGVLVREGNGVADNASMVRVDVFTKGGKYFLVPIYTWQVAKGILPNKAATQYKDEEDWEVMDNSATFKFSLHPNDLVKLVTKKKTILGYFNGLNRATGNIDIKEHDLDKSKGKQGIFEGVGIKLALSFEKYQVDELGKNIRLCKPSKRQPVR

SEQ ID NO: 463 - protein, 1052 aa, Haemophilus parainfluenzae]
MKNTSLNYVLGLDLGISSVGWAVVEIDEKENPLSLIDVGVRTFERAETQKGESLALARRLARSARRLTQRRVARLKKAKRLLKSENILLSTDECLPHQVWQLRVEGLERKLERQEWAAVLLHLIKHRGYLSQRKNESKSENKELGALLSGVANNHKLLQQTTYRTPAELAVKKFEVEEGHIRNQQGSYTHTFSRLDLLSEMELLFSRQQHFGNPFTSEKLLENLTALLMWQKPALSGDAILKMLGKCTFENEYKAAKHTYSAERFIWITKLNNLRIQENGLERALNDNERLALMKQPYEKAKLTYAQVRSILNLSDEAIFKGLRYSGEDKKTSETKTVLMEMKAYHQIRLALEKNDLKTEWAELKVNSSLLDEIGTAFSLYKTDEDISTCLAGKLSQPVLNALLENLNFDKFIQLSLKALHKILPLMQQGLRYDEACAEIYGDHYGKKTEENHLLLPQIPADEIRNPVVLRTLTQARKVINGVVRLYSSPARIHIETGREVGKSYQDRRELEKRQEENRKQREKAISEIKTLFPNFSGEPKAKDILKMRLYYQQNAKCLYSGKPLELHRLLEQGYVEIDHALPFSRTWDDSFNNKVLVLANENQNKGNLTPFEWLDGKNNSERWKAFKALVETSAFPYTKKQRILSQKLDEKGFIERNLNDTRYVARFLCNFIADNMHLTGEGKRKVFASNGQITALLRGRWGLAKSREDNDRHHALDAVVVACSTVSMQQKITRFVRFEEGNVFTGERIDRETGEIIPLHFPAPWKFFREEVEIRIFSDNPKLELENRLIARPQANHEFVQPLFVSRMPTRKMIGQGHMETIKSAKRLNEGLSVIKMLLTKLRLKDLESMVNREREKELYEALKARLEAFNDEPAKAFAEPFMKKGGAIVKSVRVEQVQKSGVLVRDGNGVADNASMVRVDVFTKGGKYFLVPIYTWQVAKGILPNKAVIQGKNEEDWEVMDDATFRFSLHQNDLVKLVTKKKTIFGYFNGLNRATGNIDIKEHDLEKSKVKDGIHQSIGIKLALSFEKYQVDELGKNIRLCKSSKRQAVR

SEQ ID NO: 464 - protein, 121 aa, Haemophilus pittmaniae
MLNRRYAAKITRFVRFEAGDVFTGERIDRETGEIIPLHFPTPWQFFKQEVEIRIFSDNPKLELENRLPDRPQANHEFVQPLFVSRMPTRKMTGQGHMETVKSAKRLNEGISVIKMPLTKLN

SEQ ID NO: 465 - protein, 203 aa, Haemophilus pittmaniae
MVNREREKDLYDALKARLEAFNDDPAKAFAEPFIKKGGAIVKSVRVEQVQKSGVLVREGNGVADNASMVRVDVFTKDGKYFLVPIYTWQVAKGILPNKAATQYKDEEDWEVMDNSAIFKFSLHPNDLVKLVTKKKTILGYFNGLDRATGNIAIKEHDLEKSKAKGGIHQGVGIKLALSFEKYQIDELGKNIRLCNPSKCQSVR

SEQ ID NO: 466 - protein, 1052 aa, Haemophilus sputorum
MKNTSLNYVLGLDLGISSVGWAVVEIDEKENPLSLIDVGVRTFERAETQKGESLALARRLARSARRLTQRRVARLKKAKRLLKSENILLSTDECLPHQVWQLRVEGLERKLERQEWAAVLLHLIKHRGYLSQRKNESKSENKELGALLSGVANNHKLLQQTTYRTPAELAVKKFEVEEGHIRNQQGSYTHTFSRLDLLSEMELLFSRQQHFGNPFTSEKLLENLTALLMWQKPALSGDAILKMLGKCTFENEYKAAKHTYSAERFIWITKLNNLRIQENGLERALNDNERLALMKQPYEKAKLTYAQVRSILNLSDEAIFKGLRYSGEDKKTSETKTVLMEMKAYHQIRLALEKNDLKTEWAELKVNSSLLDEIGTAFSLYKTDEDISTCLAGKLSQPVLNALLENLNFDKFIQLSLKALHKILPLMQQGLRYDEACAEIYGDHYGKKTEENHLLLPQIPADEIRNPVVLRTLTQARKVINGVVRLYSSPARIHIETGREVGKSYQDRRELEKRQEENRKQREKAISEIKTLFPNFSGEPKAKDILKMRLYYQQNAKCLYSGKPLELHRLLEQGYVEIDHALPFSRTWDDSFNNKVLVLANENQNKGNLTPFEWLDGKNNSERWKAFKALVETSAFPYTKKQRILSQKLDEKGFIERNLNDTRYVARFLCNFIADNMHLTGEGKRKVFASNGQITALLRGRWGLAKSREDNDRHHALDAVVVACSTVSMQQKITRFVRFEEGNVFTGERIDRETGEIIPLHFPAPWKFFREEVEIRIFSDNPKLELENRLIARPQANHEFVQPLFVSRMPTRKMTGQGHMETIKSAKRLNEGLSVIKMLLTKLRLKDLESMVNREREKELYEALKARLEAFNDEPAKAFAEPFMKKGGAIVKSVRVEQVQKSGVLVRDGNGVADNASMVRVDVFTKGGKYFLVPIYTWQVAKGILPNKAVIQGKNEEDWEVMDDATFRFSLHQNDLVKLVTKKKTIFGYFNGLNRATGNIDIKEHDLEKSKVKDGIHQSIGIKLALSFEKYQVDELGKNIRLCKSSKRQAVR

SEQ ID NO: 467 - protein, 1338 aa, Helcococcus kunzii
MQDYYLGLDIGTNSVGWAVTDENYNLLRKKGKDLWGVRLFKEAQPATERRGHRSSRRRTIRKSLRKQLLRELFEEEINAIDKDFFLRLDESKYWLEDKKIEGKYSLFNDENFTDKDYYEKFPTIFHLRKALIESDDKEDIRLYFLAINQMMKRRGHFLIDGKLSNVEDITPFKECIQNLINEELDTEIETEFYDKAIKIVSDYSLKKTEKKNLIKDLVKETDSIEDSKKIINIFNLLISGKSKVNGIFDDEEILEKIKEDNKEDFYLTSEKYEENLEYFSQLLDYRFELISSLKSIYDYIILQEVLKGKKYLSYAQVERYKNHKEDLRKLKQLIKKYDKNGKIYYQIFRDENFKKGYVAYLGYYKKNKKNVPVKKCDYDTFSKNIKSTLDKICDKEDPLYIELIDKIEKGGFLLKQIVSTNSVIPHQVHELELDKILENLEKNYPSFKEISDGVSKIDKIKMIFNFRIPYYVGPLNDYHKDKVNSNTWIVKNEGFENENIRPWNFSKIVDEHACEEEFIKRMINECSYIPGEKVLPKSSLLYSEYMVLNELNNLRVNGDKLNPKIKKEIVENIYKKERKVTLKKIRNFLIINNYVDSKVEFSGLSDGIKANMSSYIDFAEILDDNFDNNMVEDLIEQITIHVGNVKLLTEKISNKYPNLEKKQINKIVNLKFKDWARFSRKLLVGIEGTEKETGEINTIIGFLRETNENFMELMSNRYTFSEEISEIKKKYIPNKLSKQIVDDLYVSPAVKKMIWQVLNINDELIKVLGKQPKKIFIEMARGKEEKPEVKDSRKNKLIELYKNLGKEGKEWLNRIEDKTEADFRNRALYLYYTQMGRCMYTGEIIDIERLYDKELYDLDHIIPRKMKKDDSIHKNLVLVTRNSNQYEKKDNYPVPEVIKSRENVRHLWYALKKKGLITEEKYNRLTRINPLSDKELSEFIERQLVETRQTTKVVKDLFENYYTDSKIVTVKAGLVSELRRDFEVLKCREINDLNHAHDAFLNIIVGDVWSKKFTSNPYNFVKKNREKYTLNNIFTKNQKDLRGNEIWNCAEGKKRIIKTLNKPSVLFSVENFEQTGQLFDQNIIGKQDYKEKTSYVPIKGDERLQDISKYGGYRGISGAYFFIVEHTEKNKRVKTIESLPIYMKSYVEENGLLDFCTNEMKLVDPKIIVKKLNYKSEIIVDGFKYLISGKTENRLSLETNEYLYWNHTQTTDIKKILNINEKIELEKYNGDIESERENIIKYIQIILEKFKLKPFIKRRNLPNIEINFADYETEKLLQLLVNLIPLTTKYVSPVDLTVISGSKYAGKVLIPKKISNLNEVIFISKSITGIYESRRRII

SEQ ID NO: 468 - protein, 1023 aa, Helicobacter cinaedi
MKIYSFDIGVASIGWAFIENEVLQDCGIRIFTKAENPKNGASLALPRREARGVRKRLARRRGRLNTIKQLLCKEFGLQLEDYLSNDGELPKAYTASKANPLKSPYELRTLALSQKLDSKDLVRVILHIAKHRGYGNKHAKDSKDTESGKVKKAIEFNRKTLAEKGYRSVGEYLYREFFQQSRISQNNGATEFINVRNKAGNYEHCVAQDMLKEELESILNAQRQFGFSLKQDFENKLLTKIFEQRPLKSFADKVGNCCFIAGEKRTPKDSLSAIEFIALSRTINTLINLSKESGEIYNRAIILQIVESTLKKGEISYKELREIIRLDERLRFKDPRLDYSREIKEAEKVKFLEFKQLKGFKKALGESFTTLARSQLDEIAEHIALIKDRVKLNEKLESYALTKEQREALSNLSFSAHINLSLQALKQILPFMRGDNGEQCLDYDESVEKAGLKALSKDTLKGQMLPPLNEFEPYLSNPVVARALAEYRKVLNALLKQYGSPHKIHIEYAREAKLSSTERQKYEKEQKDNYAANQAAHKKCQELGLEPSSTNLLKLKLWQEQGGLCLYSGAKITISYLQDPTALQVDHIYPYSRSFDDSYMNKCLVLTKANQEKGNRTPFEAFGTDSAKWGVITTLAQKLPHKKRRRILNTAFNDKEAGFKLRNLNDTSYIARLVADYTETYLEFLPLVESENTTLGKGQKGSKKHIAIVNGALTSTMRYYLGFASKDRDNHLHHALDAVIIGFMNDSVIKAFSDFKKTQETSKAAYYAHTLSKQEYKKQRAFIQLPSGENFRASVLEKVESVFVSKPPRKRVRGALHEATFYSPNDPKLLKNYGGTKGVERALALGKMRKVGAKIVSNGAMVRVDIFRHKSSGKFYGVPVYTMDFALGILPNKAVVVGKDKNGVIKDWLEMDSSYEFIFSLYKDDLLLVQKKEMAEPELCYFMSFNSSIAQISVAKHDNNFSTLTKNQKLLFSNATQEDVSGKSIGIQNLQVFEKWQVSVLGEVKRTQSYPRENISLASKAKK

SEQ ID NO: 469 - protein, 1023 aa, Helicobacter cinaedi
MKIYSFDIGVASIGWAFIENEVLQDCGIRIFTKAENPKNGASLALPRREARGVRKRLARRRGRLNTIKQLLCKEFGLQLEDYLSNDGELPKAYTASKANPLKSPYELRTLALSQKLDSKDLVRVILHIAKHRGYGNKHAKDSKDTESGKVKKAIEFNRKTLAEKGYRSVGEYLYREFFQQSRISQNNGATEFINVRNKAGNYEHCVAQDMLKEELESILNAQRQFGFSLKQDFESKLLTKIFEQRPLKSFADKVGNCCFIAGEKRAPKDSPSAIEFIALSRTINTLINLSKESGEIYNRAIILQIVESTLKKGEISYKELREIIRLDERLRFKDPRLDYSREIKEAEKVKFLEFKQLKGFKKALGESFTTLAISQLDEIAEHIALIKDRVKLNEKLESYALTKEQREALSNLSFSAHINLSLQALKQILPFMRGDNGEQCLDYDESVEKAGLKALSKDTLKGQMLPPLNEFEPYLSNPVVARALAEYRKVLNVLLKQYGSPHKIHIEYAREAKLSSTERQKYEKEQKDNYAANQAAHKKCQELGLEPSSTNLLKLKLWQEQGGLCLYSGAKITISYLQDPTALQVDHIYPYSRSFDDSYMNKCLVLTKANQEKGNRTPFEAFGTDSAKWGVITTLAQKLPHKKRRRILNTAFNDKEAGFKLRNLNDTSYIARLVADYTETYLEFLPLVESENTTLSKGQKGSKKHIAIVNGVLTSTMRYYLGFASKDRDNHLHHALDAVIIGFMNDSVIKAFSDFKKTQETSKAAYYAHTLSKQEYKKQRAFIQLPSGENFRVSVLEKVESVFVSKPPRKRVRGALHEATFYSPNDPKLLKNYGGTKGVERALALGKMRKVGAKIVSNGAMVRVDIFRHKSSGKFYGVPVYTMDFALGILPNKAVVVGKDQNGVIKDWLEMDSSYEFIFSLYKDDVILVQKKEMQRPELCYFVSFDTSGASIKVAKHDNNFSTLTENQKLLFSNATKEEVVGKSIGIQNLKVFEKWQVSVLGEVKRTQSYPRENISLASKAKK

SEQ ID NO: 470 - protein, 344 aa, Helicobacter pullorum
MKILGFDIGIASIGWAFVENGELKDCGVRIFTKAENPKTGDSLAMPRREARSVRRRLARRKGRLETLKRLLAKEWDLCYEDYIAADGELPKAFMGKNLTNPYVLRYEALQRLLSKEELVRVVLHIAKHRGYGNKNAKITKSEESKREQGKILSALATNASVIARYRTVGEYFYKEFCEVIKNPQGLNTNENCTQPKVRVLKPIRNKGGEYTNCILQEDLQRELRCIFEHQKGFGFSITQEFQDKILKIAFYQRSLKDFSHLVGKCTFYPDEPRAPKFSLSAIEFITKAKAINLLASIAKESGEVWDKEQWRERLDSVFSAVCERGINTIPSSSHFLNIFDILYL

SEQ ID NO: 471 - protein, 1688 aa, Ignavibacterium album
MEFKKVLGLDIGTNSIGCALLSLPKSIQDYGKGGRLEWLTSRVIPLDADYMKAFIDGKNGLPQVITPAGKRRQKRGSRRLKHRYKLRRSRLIRVFKTLNWLPEDFPLDNPKRIKETISTEGKFSFRISDYVPISDESYREFYREFGYPENEIEQVIEEINFRRKTKGKNKNPMIKLLPEDWVVYYLRKKALIKPTTKEELIRIIYLFNQRRGFKSSRKDLTETAILDYDEFAKRLAEKEKYSAENYETKFVSITKVKEVVELKTDGRKGKKRFKVILEDSRIEPYEIERKEKPDWEGKEYTFLVTQKLEKGKFKQNKPDLPKEEDWALCTTALDNRMGSKHPGEFFFDELLKAFKEKRGYKIRQYPVNRWRYKKELEFIWTKQCQLNPELNNLNINKEILRKLATVLYPSQSKFFGPKIKEFENSDVLHIISEDIIYYQRDLKSQKSLISECRYEKRKGIDGEIYGLKCIPKSSPLYQEFRIWQDIHNIKVIRKESEVNGKKKINIDETQLYINENIKEKLFELFNSKDSLSEKDILELISLNIINSGIKISKKEEETTHRINLFANRKELKGNETKSRYRKVFKKLGFDGEYILNHPSKLNRLWHSDYSNDYADKEKTEKSILSSLGWKNRNGKWEKSKNYDVFNLPLEVAKAIANLPPLKKEYGSYSALAIRKMLVVMRDGKYWQHPDQIAKDQENTSLMLFDKNLIQLTNNQRKVLNKYLLTLAEVQKRSTLIKQKLNEIEHNPYKLELVSDQDLEKQVLKSFLEKKNESDYLKGLKTYQAGYLIYGKHSEKDVPIVNSPDELGEYIRKKLPNNSLRNPIVEQVIRETIFIVRDVWKSFGIIDEIHIELGRELKNNSEERKKTSESQEKNFQEKERARKLLKELLNSSNFEHYDENGNKIFSSFTVNPNPDSPLDIEKFRIWKNQSGLTDEELNKKLKDEKIPTEIEVKKYILWLTQKCRSPYTGKIIPLSKLFDSNVYEIEHIIPRSKMKNDSTNNLVICELGVNKAKGDRLAANFISESNGKCKFGEVEYTLLKYGDYLQYCKDTFKYQKAKYKNLLATEPPEDFIERQINDTRYIGRKLAELLTPVVKDSKNIIFTIGSITSELKITWGLNGVWKDILRPRFKRLESIINKKLIFQDEDDPNKYHFDLSINPQLDKEGLKRLDHRHHALDATIIAATTREHVRYLNSLNAADNDEEKREYFLSLCNHKIRDFKLPWENFTSEVKSKLLSCVVSYKESKPILSDPFNKYLKWEYKNGKWQKVFAIQIKNDRWKAVRRSMFKEPIGTVWIKKIKEVSLKEAIKIQAIWEEVKNDPVRKKKEKYIYDDYAQKVIAKIVQELGLSSSMRKQDDEKLNKFINEAKVSAGVNKNLNTTNKTIYNLEGRFYEKIKVAEYVLYKAKRMPLNKKEYIEKLSLQKMFNDLPNFILEKSILDNYPEILKELESDNKYIIEPHKKNNPVNRLLLEHILEYHNNPKEAFSTEGLEKLNKKAINKIGKPIKYITRLDGDINEEEIFRGAVFETDKGSNVYFVMYENNQTKDREFLKPNPSISVLKAIEHKNKIDFFAPNRLGFSRIILSPGDLVYVPTNDQYVLIKDNSSNETIINWDDNEFISNRIYQVKKFTGNSCYFLKNDIASLILSYSASNGVGEFGSQNISEYSVDDPPIRIKDVCIKIRVDRLGNVRPL

SEQ ID NO: 472 - protein, 1354 aa, Indibacter alkaliphilus
MKKILGLDLGTTSIGWAFIKEPEKDVVGSEIVDMGVRIVPLSSDEENDFAKGNTISINADRTLKRGARRNLQRFKQRRNALLETFKEKNLIPSNFQYAEDGPSSTFSTLKLRDKAAKEKIELDDFVKVLLQINKKRGYKSSRKAMSEEDEGTAIDSMGIAKELYENDLTPGQWVYEALKNGRKNVPDFYRSDLQEEFKKIVNYQSEFYPDILNTSFVEDWMGKASTPTKQYFNKRGVQLAENKGKREERRLQEYKWRAEAVNFKIDLSEIALILSQINSQISNSSGYLGAISDRSKELYFKNLTVGQYLYQQVKKNPHTRLKGQVFYRQDYLDEFEKIWSVQSSFYPQLNDELKQEVRDVTIFFQRRLKSQKHLISNCEFEEHHKVVPKSHPIFQEFRIWQNLNNLTLIKKDNLNEKCELALEDKTALANELAFKKELSVKDALKVLGLKPSDWEFNFTKIEGNRTNHAFFEAFAKIIELEDGEPIDLGNLKADDILDQFSEAFLRIGIDTELLQVNSDIEGAEYEKQSYIQFWHLLYSSEDDQKLKQNLIRKFGFKPEHAKILASISLQDDHASLSSRAIKKILPHLQSGLIYDKACTYAGYNHSSSFTKDENEKRELRAELELLKKNSLRNPVVEKILNQMINVVNAILKDPNLGRPDEIRVEMARELKANAEQRKNMTSNIASATRDHEKYREILKKEFGLKRVTKNDLLRYKLWLETDGISLYTGKPIEASKLFSKEYDIEHIIPKARLFDDSFSNKTICERQLNIDKANVTAFSFLQNKLSADEFEQYQSRVKSLYGKLSKAKIQKLLMANDKIPEDFIARQLQETRYISKKAKEILFEITMRVSVTTGTITDKLREDWGLVEIMKELNWEKYDKLGLTYTIEGKHGERLNKIKDWNKRNDHRHHAMDALTVALTKPAYIQYLNNLNAKAIGNKKGTEIFAIEQKYLKRENGKLCFIPPIENIRAEAKKHLSKILVSYKAKNKVVTINKNKTKKKAGFNEQTALTPRGQLHKETVYGKSFHYSTKFEKIGASFDAQKINTVAKKEEREALLKRLAENGNDPKKAFTGKNSLNKMPIYLDLGKNIKLSEKVKTVVLEQNYTIRKNIDPDLKVDKVIDVGIKRILESRLEEFGGNAKLAFSNLEENPIWLNKEKGIPIKRVKISGVSNVESLHVKKDHFGEKILDEEGNEIPVDFVSTGNNHHVAIYEDEDGNLQDEVVNFYEAVIRRNQGESIIKYRHEEGWNFLYSIKQNEFFVFPSQDFNPNDFDLLDPKNYDLISPNLYRAQKFSKVMYGNSAVRDYVFRHHLETVLNDVKELKDVAYKQLKSLQYLNGIKKVRLNHLGQIIQVGEY

SEQ ID NO: 473 - protein, 1397 aa, Joostella marina
MKKVLGLDLGTNSIGWALVNEATKEEKKEGKSSEIIKLGVRVNPLTVDEKTNFEKGRPLSTNADRTLKRSARRNLQRYKLRRRNLIEILIKNGFITKDTPLTETGKDTTHQTLKLRAKSAKEKVDLKDFAKILLTINKKRGYKSSRKVNSDEDGLAIDGMAVAKHLYEQNLTPGQYVLNLLQKNKKYVPDFYRSDLQEEFKNIWNNQKTYYFDILTDTLFEELKDKNKSQTWAICKKPFDIAGIKQIGKASDKRLERYKWRTEGLTQKLNLEYLAIALQEINNDINKSSGYLGAISDRSKELFFNKETVGENLYRQLVKTPHTSLRNQVFYRQDYLDEFETIWETQAKFYPQLTHTLKEEIRDVIIFYQRKLKSQKSLISFCQFESWEQTYIEKETGKSKTRTVGRKVIPKSSPLFQEFKIWQNLNSLEFRNSDEGEIIEFIKLDEDIRQTVFEELNLRGNLKPNDVLKILGNYISLGKVSQWKCNFEEIEGNRTNAALYNVYQIIAENEGYGFDWAKKTASEINKELKNIFPQLGIDASILDFDFTQANFDKQTSYQLWHLLYSAEEDFKISEEDKVLYGNSSVSLKKKLHQKYGFKPEYTKLLTNISLQPDYGNLSAKAICNILPYLKENNVYSEACDLTGYNHSNFLTAEEQAKRPLKPILELLKKNSLRNPVVEKILNQMVNVVNQVIETYGKPDEIRIELTRELKKSAKERANMTKSIADATRRNDDYRKTIIKEFGIPNPTKSDVVRYRLWQELASRGYKDIFTDTEIKPQELFSNKIDIEHIIPKALLFDDSFSNKTLAFKKDNLKKANRTAYDFIANDYAPNLENYIERVESLHKDRKITRAKRNKLLMLQSKLPDGFIERDLRNSQYITKEAKKMLYEVCRTVVSTSGSITDKLREDWDLINVMKELNFPKYKALGLTEKIERYDIGAEKMKEVEIIEDWNKRNDHRHHAIDALTVAFSTHSHIQYLNHLNARRDEGHKKHAAIIAIESTITEKEGNKKRRFIAPLPNFRLQAKEHIESILVSFKNKNKVVTNNINKTKRIKKDKFNTKVQLTPRGQLHKETIYGKIKQPLEKHIKLNKSFTLEQAKLIIDKRQREKVLNHLEKYAHNSDIAFNSKTLKKNPLLISDEPLKEVLCFEEVFTIRKDISYDNFKNEKQLDKVIDEKVKQALKERINQYNGDFREAFSDIERNPIWLNKAKGICVKRATIKGVSNAEPLHTAKNHLGEEVLTENKEQIPVDYVSTGNNHHVAIYEDEDGNLQEKVVSFYEAVIRVNEGLPIIDKEYNKSLGWTFKFTMKQNEMFVFPSEDFNPTEIDLLDQKNASLISPNLFRVQKFTIKDYFFRHHLETTVENNNTLKNTTWRREGLSGIYGIIKIRLNHLGEIVQVGEY

SEQ ID NO: 474 - protein, 1060 aa, Kingella kingae
MAAKSLNYILGLDLGIASCGWAVVEMDEQENPLRLIDVGVRTFEEAENPKDGSSLAETRRLARAQRRLISRRANRMNKLCRLLKQENVLQANDYDEKGLIIGLPNQAWELRAQGLDRKLEPKEWAAVLIHLVKHRGYLSQRKNESQTADKELGALLSGMNHNHQLLQSQSNQYRTPAELAIKQFATQDGHIRNQRGAYTHTFNRLDLQNELNQLFDAQTRLGNPHVSGSLKTAINDLLMNQKAALSGDAILEMLGRCTFEPSEYKAAKNTYSAERFVWLGKLTNLRIQDNGLESALSREQRELLLNEPYNKTKLTYQQVRKLLRLPETAFFKGLRYGKDNAESATFMEMKSYHAIRKSLENKSLKSEWEKLKTQPKLLDLIGTAFSIYKTDDEIAGCLKNQLPENVIIALQGQLNFSNFMELSLKALEKLLPLMEQGLRYDEACTQIYGNRHEKIADKTEKFLPNIPADKLRNPVVLRTLTQARKVINAIIRRYGSPARVHIETGREVGKSFSDRDKLKKQQEENQEQRRRAIDEWKQFFPNAAHEPKAVDILKLRLYQLQQGKCLYSGLPIDVRRLPEKGYVEIDHALPFSRTWDDSFNNKILVLASENQNKGNQTPYEYLRGADNSESWRLFVENVQNCQFSPNKKQKIMAKQLDEKGFLERNLNDTRYVSRFLCQFISEHLHLTGKGKKRVFASNGQITALLRGRWGLSKNREENDRHHAVDAVVVACSTVAMQQKITQFVRYQKGNVFTGERIDKETGEVISIHFPTPWEHFREEVMIRVFDDNPLRTLPEKLPNRPEALHEYVMPLFVSRMPTRKMTGQGHKETIKSAKRLDEKISVLRVPLTQLKLNDLENMVNREREPALYEALKARLEQFKNDPAKAFAEPFFKQGGQQVKAVRVEIVQKSGMLLRKINGVADNGSMVRVDVFEKSGKFYLVPIYAWQVAEGILPNYAVVAHKDESDWILMDESYHFKFALYKNDLLEVQTKKGGIMGYFASLDRATGAITIREHDRDKKKCKDGEHRSIGVKMASSFKKLQVDELGKNIHETRSRKRPNIG

SEQ ID NO: 475 - protein, 1314 aa, Lactobacillus animalis
MLKKDYSIGLDIGTNSVGHAVVTDDYKVPTKKMKVFGDTSKKTIKKNMLGVLLFNEGQTAADTRLKRGTRRRYTRRKNRLRYLQEIFAPELAKVDPNFLYRLEESSLVAEDKKYDVYPIFGKREEELLYHDTYKTIYHLRSALANNDQPADLRLVYLALAHIIKYRGNFLLEGEIDLRTTDINKVFAEFSETLNENSDENLGKLDVADIFKNNTFSKTKKSEELLKLSGAKKNQLAHQLFKMMVGNMGSFKKVLGTDEEHKLSFGKDTYEDDLNDLLAEAGDQYLDIFVAAKKVYDAAILASILDVKDTQTKTVFSQAMIERYEEHQKDLIELKRVFKKYLPEKCHDFFSEPKISGYAGYIDGKVSEEDFYKYTKKTLKGIPETEEILQKIDANNYLRKQRTFDNGAIPHQVHLKELVAIVENQGKYYPFLRENKDKFEKILNFRIPYYVGPLARGNSKFAWLTRAGEGKITPYNFDEMIDKETSAEDFIKHMTINDLYLPTEPVLPKHSLLYERYTIFNELAGVRYVTENGEAKYFDAQTKRSIFELFKLDRKVSEKMVIKHLKVVMPAIRIQALKGLDNGKFNASYGTYKDLVDMGVAPELLNDEVNSEKWEDIIKTLTIFEGRKLIKRRLENYRDFLGEDILRKLSRKKYTGWGRLSAKLLDGIYDKKTHKTILDCLMTEDYSQNFMQLINDDNYSFKETIKNAQVIEKEETLAKTVQELPGSPAIKKGILQSLEIVDEIIKVMGYKPKSIVVEMARETQKTHGTRKREDRVQQIVENLKDANELPEKLPSNAELSDERKYLYCLQNGRDMYTGAPLDYDHLQFYDVDHIIPQSFLKDDSIENKVLTIKKENVRKTNGLPSEAVIQKMGSFWKKLLDAGAMTNKKYDNLRRNLHGGLNEKLKERFIERQLVETRQITKYVAQLLDQRLNYDGNGVELDEKIAIVTLKAQLASQFRSEFKLRKVRALNNLHHAHDAYLNAIVANLIMAKYPELEPEFVYGKYRKAKFKGLGKATAKNTLYANVLYFLKENEVYPFWDKARDLPTIKRYLYRAQVNKVRKAERQIGGFSDEMLVPKSDSGKLLPRKEGLDPVKYGGYAKAVESYAVLITADEVKKGKTKKVKTLVNIPIIDSKKYEADPTAYLASRGYTNVTNSFILPKYSLLEDPEGRRRYLASFKEFQKANELILPQHLVELLYWVNAKDGEQKLEDHKAEFKELFDKIMEFADKYVVAPKNSEKIRRLYEENQDATPMELGKNFVELLRYTADGAASDFKFFGENIPRKRYNSAGSLLNGTLIYQSKTGLYETRIDLGKL

SEQ ID NO: 476 - protein, 1371 aa, Lactobacillus buchneri
MKVNNYHIGLDIGTSSIGWVAIGKDGKPLRVKGKTAIGARLFQEGNPAADRRMFRTTRRRLSRRKWRLKLLEEIFDPYITPVDSTFFARLKQSNLSPKDSRKEFKGSMLFPDLTDMQYHKNYPTIYHLRHALMTQDKKFDIRMVYLAIHHIVKYRGNFLNSTPVDSFKASKVDFVDQFKKLNELYAAINPEESFKINLANSEDIGHQFLDPSIRKFDKKKQIPKIVPVMMNDKVTDRLNGKIASEIIHAILGYKAKLDVVLQCTPVDSKPWALKFDDEDIDAKLEKILPEMDENQQSIVAILQNLYSQVTLNQIVPNGMSLSESMIEKYNDHHDHLKLYKKLIDQLADPKKKAVLKKAYSQYVGDDGKVIEQAEFWSSVKKNLDDSELSKQIMDLIDAEKFMPKQRTSQNGVIPHQLHQRELDEIIEHQSKYYPWLVEINPNKHDLHLAKYKIEQLVAFRVPYYVGPMITPKDQAESAETVFSWMERKGTETGQITPWNFDEKVDRKASANRFIKRMTTKDTYLIGEDVLPDESLLYEKFKVLNELNMVRVNGKLLKVADKQAIFQDLFENYKHVSVKKLQNYIKAKTGLPSDPEISGLSDPEHFNNSLGTYNDFKKLFGSKVDEPDLQDDFEKIVEWSTVFEDKKILREKLNEITWLSDQQKDVLESSRYQGWGRLSKKLLTGIVNDQGERIIDKLWNTNKNFMQIQSDDDFAKRIHEANADQMQAVDVEDVLADAYTSPQNKKAIRQVVKVVDDIQKAMGGVAPKYISIEFTRSEDRNPRRTISRQRQLENTLKDTAKSLAKSINPELLSELDNAAKSKKGLTDRLYLYFTQLGKDIYTGEPINIDELNKYDIDHILPQAFIKDNSLDNRVLVLTAVNNGKSDNVPLRMFGAKMGHFWKQLAEAGLISKRKLKNLQTDPDTISKYAMHGFIRRQLVETSQVIKLVANILGDKYRNDDTKIIEITARMNHQMRDEFGFIKNREINDYHHAFDAYLTAFLGRYLYHRYIKLRPYFVYGDFKKFREDKVTMRNFNFLHDLTDDTQEKIADAETGEVIWDRENSIQQLKDVYHYKFMLISHEVYTLRGAMFNQTVYPASDAGKRKLIPVKADRPVNVYGGYSGSADAYMAIVRIHNKKGDKYRVVGVPMRALDRLDAAKNVSDADFDRALKDVLAPQLTKTKKSRKTGEITQVIEDFEIVLGKVMYRQLMIDGDKKFMLGSSTYQYNAKQLVLSDQSVKTLASKGRLDPLQESMDYNNVYTEILDKVNQYFSLYDMNKFRHKLNLGFSKFISFPNHNVLDGNTKVSSGKREILQEILNGLHANPTFGNLKDVGITTPFGQLQQPNGILLSDETKIRYQSPTGLFERTVSLKDL

SEQ ID NO: 477 - protein, 315 aa, Lactobacillus casei
MFKDYLKQLEDDGTAKAIRQLYDRYIDGDDAKPFVREDFVKALTKEVTAHPNAKSPELLERLAQPDFMLKQRNKANGAIPVQMQQRELDQIIKNQSVYYDWLAAPNPVEKHRKSMPYQLDELLNFRIPYYVGPLVTAKEQKAARGGVFAWMVRKDPDGNITPYNFDEKVDREASANTFIQRMKTTDTYLIGEDVLPKQSLLYQSYEVLNELNNVRVNDNKLSFDQKQQVLGELFERHNTVTIKQFVDNLLAHGDYDRIPEVRGLADEKRFLSSLSTYNQLKGILHEAIDDSDKQTDMVDCKINPNAVRTKKISFL

SEQ ID NO: 478 - protein, 236 aa, Lactobacillus casei
MFKDYLKQLEDDGTAKAIRQLYDRYIDGDDAKPFVREDFVKALTKEVTAHPNAKSPELLERLAQPDFMLKQRNKANGAIPVQMQQRELDQIIKNQSVYYDWLAAPNPVEKHRKSMPYQLDELLNFRIPYYVGPLVTAKEQKAARGGVFAWMVRKDPDGNITPYNFDEKVDREASANTFIQRMKTTDTYLIGEDVLPKQSLLYQSYEVLNELNNVRVNDNKLSSSIFKSSATMITNS

SEQ ID NO: 479 - protein, 1389 aa, Lactobacillus casei
MIIRTYELKTITTIAILKMFQLLTGGLSMTKLGKPYGIGVDIGSNSIGFAAVDENSHLIRLKGKTVIGARLFEEGKAAADRRASRTTRRRLSRNRWRLSFLRDFFESHITPTGPNFFMRQKYSEISPKDKARYKYEKRLFNDRTDAEFYQQYPTMYHLRNRLLTDPSKADVREIYFAIHHILKSRGHFLTSGYAKDFNTNKVALNEIFPALQDAYAQVYPDLDITFDENKVNEFKTVLLNEKATPSDTQRALVNLLLAEDGDKDILKQQKQVLTEFAKAVVGLKTKLNVALGTEVDSSEATVWNFSLGQLDDKWAGIESAMTDEGTEILDQIRDLYRARLLNGIVPAGKTLSQAKVDDYAQHHEDLELFKDYLKQLEDDGTAKAIRQLYDRYIDGDDAKPFVREDFVKALTKEVTAHPNAKSPELLERLAQPDFMLKQRNKANGAIPVQMQQRELDQIIKNQSVYYDWLAAPNPVEKHRKSMPYQLDELLNFRIPYYVGPLVTAKEQKAAQGGVFAWMVRKDPDGNITPYNFDEKVDREASANTFIQRMKTTDTYLIGEDVLPKQSLLYQRYEVLNELNNVRVNNEKLSIEQKQQVIRELFERHNSVTIKQFAENLRAHGDYAHIPEIRGLADEKRFLSSLSTYRQLKSLLPDAIDDPAKQADIENIIAWSTVFEDAAIFKTKLKEINWLDSQTITKLSNIRYRGWGQFSHKFLNGLTLGNGHTIIQELFLSNNNLMQILTDETLQKKMTELNADKLKAANINDAIDDAYTSPSNKKALRQVLRVIEDIKRAADGQDPSWLYVETADGGGTPGKRTRARQHQLQEIYANAAHELIDSAVRGELEDKIADKADFNDRLVLYFMQGGRDIYTGTPLNIDQLSSYDIDHILPQSLIKDNSLDNRVLVHAIINREKNATFASTIYAQKMNATWRQWHEAGLISGRKLRNLQMRPDQIDKYASGFVARQLVETRQIIKLTEQIVAAQYPETKIIAVKAGLSHQLREELEFPKNRDVNHYHHAFDAFLAARIGTYLLKRFPNLQAFFTYGKFKKADVKKLRGFNFIRDITHAEDKIVVKDTGEVIWDKKRDVDELDRIYNFKRMLITHEVHFEKADLFKQTVYGAKDSKEAGGKKQLISKKKGYPVDIYGGYTQETGSYLSVVRLTKKAMYAVVKVSTRDAAKLAVAKSISEQKENETLNDIIDEKLSKISKNGKITHELFEVVLPRVGQKTLFKNSKYNLFLVNSDTYMHNYQELWMPREYQKMWKDISLSKYGDAQTEDQLDQIFGFIVSQVNSYFNLYDINQFRKKLNDAADKFATLPMRDTDDMQGKIATIGQLLIGLQANAARSDLRNLDIKTPLGLLQIPNGISLDSDTSVVYQSPTGLLEREVHLSDL

SEQ ID NO: 480 - protein, 412 aa, Lactobacillus casei
MIKDNSLDNRVLVHPLVNREKDTIFASTRFAKQTNGMWRQWHAAGLISSRKLRNLQMRPDEIDKYASGFVARQLVETRQIIKLTEQIVADQYPDTKIIAVKAGLSSQLRKELDFPKNREVNHYHHAFDAFLAARIGTYLLKRYPNLEPFFTYGKFKKTEVKKLKSFNFIRDMTHAKDKIVAKETGEIVWDNASDINELDRIYNFKRMLITHEVRFETASLFKQTLYAAKNPKNRGGSRQLIPKKKGYLVDIYGGYTQETGSYLSVVRLTKKAMYAVVKVSTRDAAKLAVAKSISEQKENETLKKIIDGKLSKTSKKGKTTHQLFEIVLPRVGQKTLFKNSKYNQFLVNSDTYMHNYQELWMPREYQRMWKDILLSNHGDAQIEGQLDQIFKFIVSQVNSYFNLYDINQFRKK

SEQ ID NO: 481 - protein, 234 aa, Lactobacillus casei
MKVTKKTETIFKVVKIATSQVAALNKARSRSTAEELSVLTELLKPKFSKVGKNGKITDTPFEVVLPRVPREQLFYNAKYGFFMVNSDTMFHNFQEIWVSRSDQKILQQIRKAKIDYPNVDQDLDNLFHNLADQIVKYFDLYSIAGFKEKISQSQNTFNDLAVDDTDQSVGKITVINELLKGAQANGMTGSLKVLKISTPFGFTQDKSGVLTKDSSIIYQSPTGLFERSVRLTDL

SEQ ID NO: 482 - protein, 566 aa, Lactobacillus casei
MQILTDEVLKQKIAELNAHELKASGIYAAIDDAYTSPSNKKALRQVLSVIDDITNAAGQAPNWLYIETADGDGVPGKRTNSRQRKIQEIYVNAAQELITSSVRGELEDKIASRADFTDRLVLYFMQGGRDIYTGEPLNIDNLSSYDIDHILPQSLIKDNSLDNRVLVHPLVNREKDTIFASTRFAKQMNGMWRQWHAAGLISSRKLRNLQMRPDEIDKYASGFVARQLVETRQIIKLTEQIVADQYPDAKIIAVKAGLSSQLRKELDFPKNREVNHYHHAFDAFLAARIGTYLLKRYPNLEPFFTYGKFKKTEVKKLKSFNFIRDMTHAKDKIVAKETGEIVWDNASDINELDRIYNFKRMLITHEVRFETASLFKQTLYAAKNSKNRGGSRQLIPKKKGYLVDIYGGYTQETGSYLSVVRLTKKAMYAVVKVSTRDAAKLAVAKSISEQKENETLKKIIDGKLSKTSKKGKTTHQLFEIVLPRVGQKTLFKNSKYNQFLVNSDTYMHNYQELWMPREYQRMWKDILLSNHGDAQLEGQLDQIFKFIVSQVNSYFNLYDINQFRKK

SEQ ID NO: 483 - protein, 1363 aa, Lactobacillus casei
MTKLGKPYGIGVDIGSNSIGFAAVDENSHLIRLKGKTVIGARLFEEGKAAADRRASRTTRRRLSRNRWRLSFLRDFFESHITPTDPNFFMRQKYSEISPKDKARYKYEKRLFNDRTDAEFYQQYPTMYHLRNRLLTDPSKADVREIYFAIHHILKSRGHFLTSGYAKDFNTNKVALNEIFPALQDAYAQVYPDLDITFDENKVNEFKTVLLDEKATPSDTQRALVNLLLAEDGDKDILKQQKQVLTEFAKAVVGLKMKLNVALGTEVDSSEATAWNFSLGQLDDKWAGIESAMTDEGTEILDQIRDLYRARLLNGIVPAGKTLSQAKVDDYEQHHEDLELFKDYLKQLEDDGMAKVIRQLYDRYIDGDDAKPFVREDFVKALTKEVTAHPNAKSPELLERLVQPDFMLKQRNKANGAIPVQMQQRELDQIIKNQSVYYDWLAAPNPVEKHRQSMPYQLDELLNFRIPYYVGPLVTAKEQKAAQGGVFAWMVRKDPDGNITPYNFDEKVDREASANTFIQRMKTTDTYLIGEDVLPKQSLLYQSYEVLNELNNVRVNDNKLSFDQKQQVLGELFERHNTVTIKQFVDNLLAHGDYDRIPEVRGLADEKRFLSSLSTYNQLKGILHEAIDDSDKQTDIEKIIAWSTIFEDKAIFKTKLNEISWLTAGMINSLANIRYRGWGQFSHKLLNELTLSTGRTVFEELLISSHNLMQILTDEVLKQKIAELNAHELKASGIYAAIDDAYTSPSNKKALRQVLSVIDDITNAAGQAPNWLYIETADGDGVPGKRTNSRQRKIQEIYANAAQELITGSVRGELEDKIASRADFTDRLVLYFMQGGRDIYTGEPLNIDNLSSYDIDHILPQSLIKDNSLDNRVLVHPLVNREKDTIFASTRFAKQMNGMWRQWHAAGLISSRKLRNLQMRPDEIDKYASGFVARQLVETRQIIKLTEQIVADQYPDAKIIAVKAGLSSQLRKELDFPKNREVNHYHHAFDAFLAARIGTYLLKRYPNLEPFFTYGKFKKTEVKKLKSLKSFNFIRDMTHAKDKIVAKETGEIVWDNASDINELDRIYNFKRMLITHEVRFETASLFKQTLYAAKNSKNRGGSRQLIPKKKGYLVDIYGGYTQETGSYLSVVRLTKKAMYAVVKVSTRDAAKLAVAKSISEQKENETLKKIIDGKLSKTSKKGKTTHQLFEIVLPRVGQKTLFKNSKYNQFLVNSDTYMHNYQELWMPREYQRMWKDILLSNHGDAQLEGQLDQIFKFIVSQVNSYFNLYDINQFRKKIADATDKFAKLPTHDTDNARGKIATIGQLLIGLQANAMRSDLRNLDIKTPFGLLQIGTGITLDLDTSIIYQSPTGLFEREVPLTDL

SEQ ID NO: 484 - protein, 1360 aa, Lactobacillus casei
MTKLGKPYGIGVDIGSNSIGFAAVDENSHLIRLKGKTVIGARLFEEGKAAADRRASRTTRRRLSRNRWRLSFLRDFFESHITPTDPNFFMRQKYSEISPKDKARYKYEKRLFNDRTDAEFYQQYPTMYHLRTRLLTDPSKADVREIYFAIHHILKSRGHFLTPGYAKDFNTNKVALNEIFPALQDAYAQVYPDLDITFDENKVNEFKTVLLNEKATPSDTQRALVNLLLAEDGDKDILKQQKQVLTEFAKAVVGLKTKLNVALGTEVDSSEATVWNFSLGQLDDKWAGIESAMTDEGTEILDQIRDLYRARLLNGIVPAGKTLSQAKVDDYAQHHEDLELFKDYLKQLEDDGTAKAIRQLYDRYIDGDDAKPFVREDFVKALTKEVTAHPNAKSPELLERLAQPDFMLKQRNKANGAIPVQMQQRELDQIIKNQSVYYDWLAAPNPVEKHRKSMPYQLDELLNFRIPYYVGPLVTAKEQKAAQGGVFAWMVRKDPDGNITPYNFDEKVDREASANTFIQRMKTTDTYLIGEDVLPKQSLLYQSYEVLNELNNVRVNDNKLSFDQKQQVLGELFERHNTVTIKQFVDNLLAHGDYDRIPEVRGLADEKRFLSSLSTYNQLKGILHEAIDDADKQTDIENIIAWSTIFEDKAIFKTKLNEISWLNAGMINSLANIRYRGWGQFSHKLLNELTLSTGRTVFEELLISSRNLMQILTDEVLKQKIAELNAHELKASGIYAAIDDAYTSPSNKKALRQVLSVIDDITNAAGQAPNWLYIETADGDGVPGKRTNSRQRKIQEIYANAAQELITGSVRGELEDKIASRADFTDRLVLYFMQGGRDIYTGEPLNIDNLSSYDIDHILPQSLIKDNSLDNRVLVHPLVNREKDTIFASTRFAKQMNGMWRQWHAAGLISSRKLRNLQMRPDEIDKYASGFVARQLVETRQIIKLTEQIVADQYPDTKIIAVKAGLSSQLRKELDFPKNREVNHYHHAFDAFLAARIGTYLLKRYPNLEPFFTYGKFKKTEVKKLKSFNFIRDMTHAKDKIVAKETGEIVWDNASDINELDRIYNFKRMLITHEVRFETASLFKQTLYAAKNSKNRGGSRQLIPKKKGYLVDIYGGYTQETGSYLSVVRLTKKAMYAVVKVSTRDAAKLAVAKSISEQKENETLKKIIDGKLSKTSKKGKTTHQLFEIVLPRVGQKTLFKNSKYNQFLVNSDTYMHNYQELWMPREYQRMWKDILLSNHGDAQLEGQLDQIFKFIVSQVNSYFNLYDINQFRKKIADATDKFAKLPTHDTDNARGKIATIGQLLIGLQANAMRSDLRNLDIKTPFGLLQIGTGITLDLDTSIIYQSPTGLFEREVPLTDL

SEQ ID NO: 485 - protein, 700 aa, Lactobacillus casei
MTKLGKPYGIGVDIGSNSIGFAAVDENSHLIRLKGKTVIGARLFEEGKAAADRRASRTTRRRLSRNRWRLSFLRDFFESHITPTDPNFFMRQKYSEISPKDKARYKYEKRLFNDRTDAEFYQQYPTMYHLRTRLLTDPSKADVREIYFAIHHILKSRGHFLTSGYAKDFNTNKVALNEIFPALQDAYAQVYPDLDITFDENKVNEFKTVLLDEKATPSDTQRALVNLLLAEDGDKDILKQQKQVLTEFAKAVVGLKTKLNVALGTEVDSSEATAWNFSLGQLDDKWAGIESAMTDEGTEILDQIRDLYRARLLNGIVPAGKTLSQAKVDDYEQHHEDLELFKDYLKQLEDDGMAKAIRQLYDRYIDGDDAKPFVREDFVKALTKEVTAHPNAKSPELLERLVQPDFMLKQRNKANGAIPVQMQQRELDQIIKNQSVYYDWLAAPNPVEKHRQSMPYQLDELLNFRIPYYVGPLVTAKEQKAAQGGVFAWMVRKDPDGNITPYNFDEKVDREASANTFIQRMKTTDTYLIGEDVLPKQSLLYQSYEVLNELNNVRVNDNKLSFDQKQQVLGELFERHNTVTIKQFVDNLLAHGDYDRIPEVRGLADEKRFLSSLSTYNQLKGILHEAIDDSDKQTDIEKIIAWSTIFEDKAIFKTKLNEISWLNAGMINSLANIRYRGWGQFSHKLLNELTLSTGRTVFEA

SEQ ID NO: 486 - protein, 330 aa, Lactobacillus casei
MTKLGKPYGIGVDIGSNSIGFAAVDENSHLIRLKGKTVIGARLFEEGKAAADRRASRTTRRRLSRNRWRLSFLRDFFESHITPTDPNFFMRQKYSEISPKDKNRYKYEKRLFNDRTDAEFYQQYPTMYHLRNRLLTDPSKADVREIYFAIHHILKSRGHFLTPGDAKDFNTNKVALNEIFPALQDAYAQVYPDLDITFDENKMNEFKTVLLNEKATPSDTQRALVNLLLAEDGDKDILKQQKQVLTEFAKAVVGLKTKLNVALGTEVDSSEATAWNFSLGQLDDKWAGIESAMTDEGTEILDQIRDLYRARLLNGIVPAGKTLSQAKVDD

SEQ ID NO: 487 - protein, 330 aa, Lactobacillus casei
MTKLGKPYGIGVDIGSNSIGFAAVDENSHLIRLKGKTVIGARLFEEGKAAADRRASRTTRRRLSRNRWRLSFLRDFFESHITPTDPNFFMRQKYSEISPKDKNRYKYEKRLFNDRTDAEFYQQYPTMYHLRNRLLTDPSKADVREIYFAIHHILKSRGHFLTPGDAKDFNTNKVALNEIFPALQDAYAQVYPDLDITFDENKMNEFKTVLLNEKATPSDTQRALVNLLLAEDGDKDILKQQKQVLTEFAKAVVGLKTKLNVALGTEVDSSEATAWNFSLGQLDDKWAGIESAMTDEGTEILDQIRDLYRARLLNGIVPAGKTLSHAKVDD

SEQ ID NO: 488 - protein, 1361 aa, Lactobacillus casei
MTKLGKPYGIGVDIGSNSIGFAAVDENSHLIRLKGKTVIGARLFEEGKAAADRRASRTTRRRLSRNRWRLSFLRDFFESHITPTGPNFFMRQKYSEISPKDKARYKYEKRLFNDRTDAEFYQQYPTMYHLRNRLLTDPSKADVREIYFAIHHILKSRGHFLTSGYAKDFNTNKVALNEIFPALQDAYAQVYPDLDITFDENKVNEFKTVLLNEKATPSDTQRALVNLLLAEDGDKDILKQQKQVLTEFAKAVVGLKTKLNVALGTEVDSSEATVWNFSLGQLDDKWAGIESAMTDEGTEILDQIRDLYRARLLNGIVPAGNTLSQAKVDDYAQHHEDLELFKDYLKQLEDDGTAKAIRQLYDRYIDGDDAKPFVREDFVKALTKEVTAHPNAKSPELLERLAQPDFMLKQRNKANGAIPVQMQQRELDQIIKNQSVYYDWLAAPNPVEKHRKSMPYQLDELLNFRIPYYVGPLVTAKEQKAAQGGVFAWMVRKDPDGNITPYNFDEKVDREASANTFIQRMKTTDTYLIGEDVLPKQSLLYQRYEVLNELNNVRVNNEKLSIEQKQQVIRELFERHNSVTIKQFAENLRAHGDYAHIPEIRGLADEKRFLSSLSTYRQLKSLLPDAIDDPAKQADIENIIAWSTVFEDAAIFKTKLKEINWLDSQTITKLSNIRYRGWGQFSHKFLNGLTLGNGHTIIQELFLSNNNLMQILTDETLQKKMTELNADKLKAANINDAIDDAYTSPSNKKALRQVLRVIEDIKRAADGQDPSWLYVETADGGGTPGKRTRARQHQLQEIYANAAHELIDSAVRGELEDKIADKADFNDRLVLYFMQGGRDIYTGTPLNIDQLSSYDIDHILPQSLIKDNSLDNRVLVHAIINREKNATFASTIYAQKMNATWRQWHEAGLISGRKLRNLQMRPDQIDKYASGFVARQLVETRQIIKLTEQIVAAQYPETKIIAVKAGLSHQLREELEFPKNRDVNHYHHAFDAFLAARIGTYLLKRFPNLQAFFTYGKFKKADVKKLRGFNFIRDITHAEDKIVVKDTGEVIWDKKRDVDELDRIYNFKRMLITHEVHFEKADLFKQTVYGAKDSKEAGGKKQLISKKKGYPVDIYGGYTQETGSYLSVVRLTKKAMYAVVKVSTRDAAKLAVAKSISEQKENETLNDIIDEKLSKISKNGKITHELFEVVLPRVGQKTLFKNSKYNLFLVNSDTYMHNYQELWMPREYQKMWKDISLSKYGDAQTEDQLDQIFGFIVSQVNSYFNLYDINQFRKKLNDAADKFATLPMRDTDDMQGKIATIGQLLIGLQANAARSDLRNLDIKTPLGLLQIPNGISLDSDTSVVYQSPTGLLEREVHLSDL

SEQ ID NO: 489 - protein, 1128 aa, Lactobacillus casei
MTKLGKPYGIGVDIGSNSIGFAAVDENSHLIRLKGKTVIGARLFEEGKAAAKRRAGRTTRRRLSRNRWRLSFLRDFFESHITPTDPNFFMRQKYSEISPKDKARYKYEKRLFNDRTDAEFYQQYSTMYHLRNRLMTDPSRADVREIYFAIHHILKSRGHFLTPGDAKDFNTNDVALDEIFPALQDAYAQVYPDLGITFDEDKANEFKTILLNEIATSIDTQRALVKLLLAEEDDKDILKQQKQVLTEFAKAVVGLKTKLNLALGTEVDSSEATAWNFSLGQLDDKWAGIESAMTDEGTEILDQIRDLYRARLLNGIVPTGKTLSQAKVDDYTQHHEDLQLFKAYLKQLEDDGTAKAIRQLYDRYIDGDDAAPFLRENFVKALTKDVTAHPNTKSPELLERLAQPDFMLKQRNKANGAIPVQMQQRELDQIIKNQAVYYDWLAAPNPVEKHRKSMPYQLDELLNFRIPYYVGPLVTAKEQKAAQGGVFAWMVRKDPEGNITPYNFDEKVDREASANTFIQRMKTTDTYLIGEDVLPKQSLLYQRYEVLNELNNVRVNNEKLSIEQKQQVIRELFERHNSVTIKQFAENLRAHGDYAHIPEIRGLADEKRFLSSLSTYRQLKSLLPEAIDDPAKQADIENIIAWSTVFEDAAIFKTKLKEISWLGSEAITKLSNIRYRGWGQFSRKFLNGLTLGNGHTIIQELLLSTNNLMQILTDETLQKKMTELNADKLKTANINDAIDNAYTSPSNKKALRQVLRVVDDIKRAADGQDPSWLYVETADGGGTPGKRTRARQHQLQEIYANAAHELIDTAVRGELEDKISDKADFNDRLVLYFMQGGRDIYTGAPLNIDQLSSYDIDHILPQSLIKDNSLDNRVLVHAIINREKNATFASTIYAQKMNATWRQWHEAGLISGRKLRNLQMRPDQIDKYASGFVARQLVETRQIIKLTEQIVAAQYPDTKIIAVKAGLSHQLREELEFPKNRDVNHYHHAFDAFLAARIGTYLLKRFPNLQAFFTYGKFTKADVKKLRGFNFIRDITHAEDKIVAKDTGEVVWDKQRDVDELDRIYNFKRMLITHEVRFETADLFKQTVYGARDSKEAGGSKQLIPKKKDIQLIFMGAISERTRPILPL

SEQ ID NO: 490 - protein, 1366 aa, Lactobacillus casei
MTKLGKPYGIGVDIGSNSIGFAAVDENSHLIRLKGKTVIGARLFEEGKAAAYRRASRTTRRRLSRNRWRLSFLRDFFESHITPTDPNFFMRQKYSEISPKDKARYKYEKRLFNDRTDAEFYQQYPTMYHLRTRLLTDPSKADVREIYFAIHHILKSRGHFLTPGYAKDFNTNKVALNEIFPALQDAYAQVYPDLDITFDENKVNEFKTVLLNEKATPSDTQRALVNLLLAKEGDRDILKQQKQVLTEFAKAVVGLKTKLNVALGTEVDSSEATAWNFSLGQLDDKWAGIESAMTDEGTEILDQIRDLYRARLLNGIVPAGKTLSQAKVDDYAQHHEDLELFKDYLKQLEDDGTAKAIRQLYDRYIDGDDAKPFVREDFVKALTKEVTAHPNAKSPELLERLAQPDFMLKQRNKANGAIPVQMQQRELDQIIKNQAVYYDWLAAPNPVEKHRQSMTYQLDELLNFRIPYYVGPLVTAKEQKAAQGGVFAWMVRKDPDGNITPYNFDEKVDREASANTFIQRMKTTDTYLIGEDVLPKQSLLYQSYEVLNELNNVRVNDNKLSFDQKQQVLGELFERHNTVTIKQFVDNLLAHGDYDRIPEVRGLADEKRFLSSLSTYNQLKGILHEAIDDADKQTDIENIIAWSTIFEDKAIFKTKLNEISWLNAGMINSLANIRYRGWGQFSHKLLNELTLSTGRTVFEELLISSRNLMQILTDEVLKQKIAELNAHELKASGIYAAIDDAYTSPSNKKALRQVLSVIDDITNAAGQAPNWLYIETADGDGVPGKRTNSRQRKIQEIYANAAQELITGSVRGEFEDKIASRADFTDRLVLYFMQGGRDIYTGEPLNIDNLSSYDIDHILPQSLIKDNSLDNRVLVHPLVNREKDTIFASTRFAKQMNGMWRQWHAAGLISSRKLRNLQMRPDEIDKYASGFVARQLVETRQIIKLTEQIVADQYPDTKIIAVKAGLSSQLRKELDFPKNREVNHYHHAFDAFLAARIGTYLLKRYPNLEPFFTYGKFKKTEVKKLKSLKSLKSFNFIRDMTHAKDKIVAKETGEIVWDNASDINELDRIYNFKRMLITHEVRFETASLFKQTLYAAKNSKNRGGSRQLIPKKKGYLVDIYGGYTQETGSYLSVVRLTKKAMYAVVKVSTRDAAKLAVAKSISEQKENETLKKIIDGKLSKTSKKGKTTHQLFEIVLPRVGQKTLFKNSKYNQFLVNSDTYMHNYQELWMPREYQRMWKDILLSNHGDAQIEGQLDQIFKFIVSQVNSYFNLYDINQFRKKIADATDKFAKLPTHDTDNARGKIATIGQLLIGLQANAMRSDLRNLDIKTPFGLLQIGTGITLDLDTSIIYQSPTGLFEREVPLTDL

SEQ ID NO: 491 - protein, 1354 aa, Lactobacillus coryniformis
MTLHYNVGLDIGTNSVGYTIVDDNGKILQVKGKNGYGVRVFKEGATAAERRIFRTTHRRLKRRKWRLRLLQDFFEPYILPQDDGFFIRRKESNLVLNDRDEDTASLFNDRSDRDFYQAYPTIYHLRQALMTEKRQFDVREIYLAMHHIIKYRGHFLLNGTVNNFTNNKIDLHSDFEELNALLLNVIPELKFQIDLDHSTMFQTTLLNTTISRSGRQRDLVKSFYNGSDDKQLAKQQKSVATELLKAILGLKAKFHKLFNLDLLETTEWEFSFDAEDIDDKLAKLEPLMTENQQQVMDILQRIFAAITLNGIVPEGKTLSASKVDSYQKHKQDLKLLKAIAQHSDKKTATVLQTAYNEYINGIASKPLKQEDFYKRLTNAVKKSSDPQVADMLALIDQEKFLPKQRTKENGAIPHQLHQLELERIIDNQKDYYPWLAELNPNQARQKVAKYKLSELVAFRVPYYVGPLIEPEVQQATSNAHFAWMARKEAGPITPWNFDQKVDRNVSAERFIKRMTTKDTYLLAEDVLPLHSLLYQRFIVLNELNNVRVNGQKLTKKQKQAVYQDLFKRQPHVTKKQFKSYLVQTGEFAESSKIEGLANETSFNSGLTTENELRKIFGAQLDEARYQVDFEQIIEWATLFEDAKILRTKLAEITWLTTEQIEKLAGIRYRGWGRFSRKLLAGLRDQNGQQIIDLLWDTPNNFMVIVSQAAFSEAITKENEKLIDRRGAQDVITDLYTSPQNKKALRQVLAIVADVQKAMGGVPPQRIFIEFAREDEKNPRRSVERSRQLEKLYQTISNEFLINSEVRQELKEAVDQKVNFKDRLFLYFLQGGVDLYSGKRINIDQLSHYDIDHILPQSFIKDDSLDNRVLVSQKLNRSKSDSVPLSEFANYKFGPAMQAKWLQLKEAGLLSKRKYDNLTLDPTKLSKFAPLGFVNRQLVETRQVIKLAANLLASEETKVVTIKANMTHQVRKELDFPKNRNVNNYHHAFDAYLTAFVGIFLSKRYPKLKPYFTYGDFQKGNKLPDLKNFNFLYELKNKDRSIDSNTGEIIWDKQRDLAYMNKIYNFKKVTVVHEVLTKSGALYNQTLYKASEDKASGRGTKQLIRKKDNMPTELYGGYTGSTSAFMSIVRLWKKDKPYYKVVGIPTRMAAKLANQAQLLDYLTKKFTTRKLVKKTGDYKTTVERFELVVPKVGFNQLVIDGGQPFMLGSATYQYNARELFISKEAVKALNKQLSTHVDLVQVFDEILVQVNRWFPLYDTNGFREKLSHGRDRFMKLNDSFEEKSDTQIDVLNRILIGFHANAARTNLKILGLGTDLGFMTQQAGIRLTEKAILVHQSPSGLFERKVALRDLKGLR

SEQ ID NO: 492 - protein, 544 aa, Lactobacillus crispatus
KYYLYFMQLGRDAYTGKPINIDEVSQYYDIDHILPQSFIKDDSLNNRVLVAKPINNGKSDGVPLKLFGDNLATGLGITVKQMWNNWADKGLINKAKQNNLFLDPENINKHQASGFIRKQLVETSQIIKLATTILQAEYPKTKIIVVKASSNHYLRNEFDLYKSREVNDYHHAIDAYLTTICGNLLYQAYPKLRPFFVYGQFKKFSSDPKKENEILKKTKNFDFVAKLLGSKAPNEIRSQQGKVLFEKNKIRLQLNKAYNYKYMLVSRDTTTKNQEMFGMTIYPRAERDIAKSRKLIEKRKGFSTDIYGGYTGTAAAYMAIVRINKTKSSQYKVIAVPMTKRAILNKAEKEGNYEKILKQILSPSILYNDKGKRKAGVISFDIIKGKVPYNQVVQDGNKKFLLKSAIYLCNAKQLVLSEEAMRVITGHWLDSDKQDQELLDVYDEILEKIDRYLPLFDIRDFRNKLHKGREKFLKLNAEDKFKAIIQILKGLHDNSDTGELKDIGITVPFGQLQNNSGITLSSDTILVYQSPTGLFEKRVKISSL

SEQ ID NO: 493 - protein, 298 aa, Lactobacillus crispatus
MDELNKISVNGKKLSVSVKQELYEDLFKKNNTVSAKQLKNWLIENQKLPYIKIKGLADQTKFNSSLSTYIKLKKSGLFVDKLDSNEFRDDFEKIIEWSTIFEDKQIYIQKLQTIDWLTAKQIQFLQNIRLQGWGRLSKKLLTAIVDSNGQNIIEQLWNSQQIFMSIVNKADIKGTITDANQDLMHSNSMEDILSEAYTSPANKKMIRQVVKVVHDIQKAASGQAPKQIAIEFARESRRNSKLSQTRGHKLQDIYQKISGDIVNKNLKDKLAEYIKNNQLSVWEKTSFQMNKNDQDFLF

SEQ ID NO: 494 - protein, 279 aa, Lactobacillus crispatus
MNGKKLSVSVKQELYEDLFKKNNTVSAKQLKNWLIENQKLPYIKIKGLADQTKFNSSLSTYIKLKKSGLFVDKLDSNEFRDDFEKIIEWSTIFEDKQIYIQKLQTIDWLTAKQIQFLQNIRLQGWGRLSKKLLTAIVDSNGQNIIEQLWNSQQIFMSIVNKADIKGTITDANQDLMHSNSMEDILSEAYTSPANKKMIRQVVKVVHDIQKAASGQAPKQIAIEFARESRRNSKLSQTRGHKLQDIYQKISGDIVNKNLKDKLAEYIKNNQLNKDKYYTR

SEQ ID NO: 495 - protein, 538 aa, Lactobacillus crispatus
MQLGRDAYTGKPINIDEVSQYYDIDHILPQSFIKDDSLNNRVLVAKPINNGKSDGVPLKLFGDNLATGLGITVKQMWNNWADKGLINKAKQNNLFLDPENINKHQASGFIRKQLVETSQIIKLATTILQAEYPKTKIIVVKASSNHYLRNEFDLYKSREVNDYHHAIDAYLTTICGNLLYQAYPKLRPFFVYGQFKKFSSDPKKENEILKKTKNFDFVAKLLGSKAPNEIRSQQGKVLFEKNKIRLQLNKAYNYKYMLVSRDTTTKNQEMFGMTIYPRAERDIAKSRKLIEKRKGFSTDIYGGYTGTAAAYMAIVRINKTKSSQYKVIAVPMTKRAILNKAEKEGNYEKILKQILSPSILYNDKGKRKAGVISFDIIKGKVPYNQVVQDGNKKFLLKSAIYLCNAKQLVLSEEAMRVITGHWLDSDKQDQELLDVYDEILEKIDRYLPLFDIRDFRNKLHKGREKFLKLNAEDKFKAIIQILKGLHDNSDTGELKDIGITVPFGQLQNNSGITLSSDTILVYQSPTGLFEKRVKISSL

SEQ ID NO: 496 - protein, 206 aa, Lactobacillus crispatus
MQLGRDAYTGKPINIDEVSQYYDIDHILPQSFIKDDSLNNRVLVAKPINNGKSDGVPLKLFGDNLATGLGITVKQMWNNWADKGLINKAKQNNLFLDPENINKHQASGFIRKQLVETSQIIKLATTILQAEYPKTKIIVVKASSNHYLRNEFDLYKSREVNDYHHAIDAYLTTICGNLLYQAYPKLRPFFVYGQFKKFSSDPKKRK

SEQ ID NO: 497 - protein, 857 aa, Lactobacillus crispatus
MTKLNNEYMVGLDIGTNSCGWVATDFDNNILKMHGKRALGSHLFDEGVSAADRRAFRTTRRRIKRRKWRLKLLEEIFDEEMAKVDPNFFARLKESGLSPLDTRKNVSSIVFPTKKMDKQFYKKFPTIYHLRNALMKQDKKFDLRAIYIAIHHIVKYRGNFLSNSSISNFSASKIEIDRFVNELNDLYSIFLPESGVIFDAGNASKVEDIIRNEQMFKLDKIKEIADVLPDTENKSGLKLSKKISKEISKAILGYKAKFEIILQVNVDKTDSSIWNFKLNDENADVNLSEITSDLTDTQLQILDLVRNLFSAISLLNIVDEGSTLSESMIRKYNDHAQDLKLLKTVIKNHSDRKKAHNLQLAYDKYVNNRHFVDVETKKAFPNKHLYRKSDFYEIVKKNLDASKEAVQIRKEIALDKFMPKQRSDENGVIPFQLNQIELDKIIENQGKYYPFLKEINPIKAHRMQAPYKLDELIRFRVPYYVGPMIEPTNSSYPQTRQNQSFAWMVRKAKGRITPWNFDEKVDRQKSANNFIKRLTTKDTYLFGEDVLPANSLLYQKYTVLDELNKISVNGKKLSVSVKQELYEDLFKKNNTVSAKQLKNWLIENQKLPYIKIKGLADQTKFNSSLSTYIKLKKSGLFVDKLDSNEFRDDFEKIIEWSTIFEDKQIYIQKLQTIDWLTAKQIQFLQNIRLQGWGRLSKKLLTAIVDSNGQNIIEQLWNSQQIFMSIVNKADIKGTITDANQDLMHSNSMEDILSEAYTSPANKKMIRQVVKVVHDIQKAASGQAPKQIAIEFARESRRNSKLSQTRGHKLQDIYQKISGDIVNKNLKDKLAEYIKNNQLSVWEKTSFQMNKNDQDFLF

SEQ ID NO: 498 - protein, 857 aa, Lactobacillus crispatus
MTKLNNEYMVGLDIGTNSCGWVATDFDNNILKMHGKRALGSHLFDEGVSAADRRAFRTTRRRIKRRKWRLKLLEEIFDEEMAKVDPNFFARLKESGLSPLDTRKNVSSIVFPTKKMDKQFYKKFPTIYHLRNALMKQDKKFDLRAIYIAIHHIVKYRGNFLSNSSISNFSASKIEIDRFVNELNDLYSIFLPESGVIFDAGNASKVEDIIRNEQMFKLDKIKEIADVLPDTENKSGLKLSKKISKEISKAILGYKAKFEIILQVNVDKTDSSIWNFKLNDENADVNLSEITSDLTDTQLQILDLVRNLFSAISLLNIVDEGSTLSESMIRKYNDHAQDLKLLKTVIKNHSDRKKAHNLQLAYDKYVNNRHFVDVETKKAFPNKHLYRKSDFYEIVKKNLDASKEAVQIRKEIALDKFMPKQRSDENGVIPFQLNQIELDKIIENQGKYYPFLKEINPIKAHRMQAPYKLDELIRFRVPYYVGPMIEPTNSSYPQTRQNQSFAWMVRKAKGRITPWNFDEKVDRQKSANNFIKRLTTKDTYLFGEDVLPANSLLYQKYTVLDELNKISVNGKKLSVSVKQELYEDLFKKNNTVSAKQLKNWLIENQKLPYIKIKGLADQTKFNSSLSTYIKLKKSGLFVDKLDSNEFRDDFEKIIEWSTIFEDKQIYIQKLQTIDWLTAKQIQFLQNIRLQGWGRLSKKLLTAIVDSNGQNIIEQLWNSQQIFMSIVNKADIKGTITDANQDLMHSNSMEDILSEAYTSPANKKMIRQVVKVVHDIQKAASGQAPKQIAIEFARESRRNSKLSQTRGHKLQDIYQKISGDIVNKNLKDKLAEYIKNNQLSVWEKNSFQMNKNDQDFLF

SEQ ID NO: 499 - protein, 347 aa, Lactobacillus crispatus
MVNLKSLVLILKKENEILKKTKNFDFVAKLLGSKAPNEIRSQQGKVLFEKNKIRLQLNKAYNYKYMLVSRDTTTKNQEMFGMTIYPRAERDIAKSRKLIEKRKGFSTDIYGGYTGTAAAYMAIVRINKTKSSQYKVIAVPMTKRAILNKAEKEGNYEKILKQILSPSILYNDKGKRKAGVISFDIIKGKVPYNQVVQDGNKKFLLKSAIYLCNAKQLVLSEEAMRVITGHWLDSDKQDQELLDVYDEILEKIDRYLPLFDIRDFRNKLHKGREKFLKLNAEDKFKAIIQILKGLHDNSDTGELKDIGITVPFGQLQNNSGITLSSDTILVYQSPTGLFEKRVKISSL

SEQ ID NO: 500 - protein, 534 aa, Lactobacillus crispatus
RDAYTDKPINIDEVSQYYDIDHILPQSFIKDDSLNNRVLVAKPINNGKSDGVPLKLFGDNLATGLGITVKQMWNNWADKGLINKAKQNNLFLDPENINKHQASGFIRKQLVETSQIIKLATTILQAEYPKTKIIVVKASSNHYLRNEFDLYKSREVNDYHHAIDAYLTTICGNLLYQAYPKLRPFFVYGQFKKFSSDPKKENEILKKTKNFDFVAKLLGSKAPNEIRSQQGKVLFEKNKIRLQLNKAYNYKYMLVSRDTTTKNQEMFGMTIYPRAERDIAKSRKLIEKRKGFSTDIYGGYTGTAAAYMAIVRINKTKSSQYKVIAVPMTKRAILNKAEKEGNYEKILKQILSPSILYNDKGKRKAGVISFDIIKGKVPYNQVVQDGNKKFLLKSAIYLCNAKQLVLSEEAMRVITGHWLDSDKQDQELLDVYDEILEKIDRYLPLFDIRDFRNKLHKGREKFLKLNAEDKFKAIIQILKGLHDNSDTGELKDIGITVPFGQLQNNSGITLSSDTILVYQSPTGLFEKRVKISSL

SEQ ID NO: 501 - protein, 278 aa, Lactobacillus crispatus
SVNGKKLSVSVKQELYEDLFKKNNTVSAKQLKNWLIENQKLPYIKIKGLADQTKFNSSLSTYIKLKKSGLFVDKLDSNEFRDDFEKIIEWSTIFEDKQIYIQKLQTIDWLTAKQIQFLQNIRLQGWGRLSKKLLTAIVDSNGQNIIEQLWNSQQIFMSIVNKADIKGTITDANQDLMHSNSMEDILSEAYTSPANKKMIRQVVKVVHDIQKAASGQAPKQIAIEFARESRRNSKLSQTRGHKLQDIYQKISGDIVNKNLKDKLAEYIKNNQLNKDKYY

SEQ ID NO: 502 - protein, 277 aa, Lactobacillus crispatus
SVNGKKLSVSVKQELYEDLFKKNNTVSAKQLKNWLIENQKLPYIKIKGLADQTKFNSSLSTYIKLKKSGLFVDKLDSNEFRDDFEKIIEWSTIFEDKQIYIQKLQTIDWLTAKQIQFLQNIRLQGWGRLSKKLLTAIVDSNGQNIIEQLWNSQQIFMSIVNKADIKGTITDANQDLMHSNSMEDILSEAYTSPANKKMIRQVVKVVHDIQKAASGQAPKQIAIEFARESRRNSKLSQTRGHKLQDIYQKISGDIVNKNLKDKLAEYIKNNQLNKDKY

SEQ ID NO: 503 - protein, 1368 aa, Lactobacillus curvatus
MSRPYNIGLDIGTSSIGWSVVDDQSKLVSVRGKYGYGVRLYDEGQTAAERRSFRTTRRRLKRRKWRLGLLREIFEPYITPIDDTFFLRQKQSNLSPKDQRKLYTQTSLFNDRTDRAFYDDYPTIYHLRYRLMTEKRQFDIREIYLAMHHIVKYRGHFLNEAPVSSFKSSEINLVAHFDRLNTIFADLFSESGFQLETDKLAEVKALLLDNQQSASNRQRQALSLIYTPSTNKAVEKQNKAIATELLKAILGLKAKFNVLTGIEAEDVKAWTLTFNAENFDEEMVKLESSLDDNAHQIIESLQELYSGVLLAGIVPENQSLSQAMITKYDDHQKHLKMLKAVREALAPGDRQRLKQAYDQYVDGQENTKAYSKEDFYGDITKALKNNPDHPIVSEIKKLIELDQFMPKQRTKDNGAIPHQLHQQELDRIIENQQQYYPWLAELNPNSKRQTVAKYKLDELVAFRVPYYVGPLITAEQQRQSSDAKFAWLIRKAEGRITPWNFDDKVDRQASANEFIKRMTTTDTYLLAEDVLPKQSLIYQRFEVLNELNGLKIDDQPITTELKQAIFTDLFMQKISVTVKNIQDYLVSEKRYASRPAITGLSDENKFNSRLSTYHDLKMIVGDAVDDVDKQADLEKCIEWSTIFEDGKIYSAKLNEIDWLTDQQRVQLAAKRYRGWGRLSAKLLTQIVNANGQRIMDLLWDTTDNFMRIVHSEDFDKLITEANQMMLAENDVQDVINDLYTSPQNKKALRQILLVVNDIQKAMKGQAPERILIEFAREDEVNSRLSVQRKRQVEQVYQNISNELLNNTEIRNELKDLSNSALSNTRLFLYFMQGGRDMYTGDSLNIDRLSTYDIDHILPQSFIKDNSLDNRVLVSQKMNRSKADQVPTDFTSVELGQKMQIQWEQMLRAGLITKKKYDNLTLNPDHISKYAMKGFINRQLVETRQVIKLATNLLMEQYGEDNIELITVKSGLTHQMRTEFDFPKNRNLNNHHHAFDAYLTAFVGLYLLKRYPKLKPYFVYGEYQKASQQDKWRNFNFLNGLKKDELVDENTEAVIWDKESGLAYLNKIYQFKKILVTRGVHENSGALFNQTLYAAKDDKASGQGGKQLIPAKQDRSTALYGGYSGKTVAYMCIVRIKNKKGDLYKVCGVETSWLAQLKQLTDEDSQKAFLEQKISPQFTKVKKQKGNIIEAVEEFEVIAPHILINQRFFDNGQELTLGSATYKHNEQELILDKTAVKLLNGALPLTQSEELAEQVYDEILDQVMHYFPLYDTNQFRAKLSTGKAAFMKLPWKSQWDGNKMVQVGQQVILDRILIGLHANAAMSDLKVLKMTTPFGMIQQSTGITLSADTQIIYQSPTGLFERRVALRDL

SEQ ID NO: 504 - protein, 669 aa, Lactobacillus delbrueckii
MAKPKDYTIGLDIGTNSVGWVVTDDQNNILRIKGKKAIGARLFTEGKVAAERRSFRTTRRRLSRRRWRIKMLEELFDEEIAKVDPSFFARLHESWISPKDKRKRYSAIVFPSPEEDKKFHESYPTIYHLRDKLMKDDQKHDIREIYIAVHQMIKARGNFLHDESVETYRSGMSSLGGRSERNILSVQTLEELNDLFAENEGTEEVELNVASAEQINDILTGGHLNADSQKEISNLLLPSSFPSFDDKAKEKQVKKLINNVATNISKAWLGYKADFSTILNLAKVDKDQKKIFAFALQGGDEEDKVQELESLLEQSQTDIVDRLIEIRHAIVLSEIVPVGMTLSEAMIDKYDQHKEDLITLKAVIRNTKDKKKAAKLQAIYDLYVKKRHADLAKAMKLTGIKKRSELLDPEELKKGISSLLDDSPEAVEIKQRLEEKTFLPLQRSNNNGVIPNQLHQVELDEIIKKQSKYYPFLAEKNPDESEEAQKKAPTKLDALLTFRVPYYVGPMITKEEQEAQNGHSFAWMVRRDPQDHEAITPWNFEKKVDKMASATQFIKRMTTKDTYLLGEDVLPASSLKYQLFTVLNELNNLRVNGKKLTSDEKEQVIEGLFKKQKTVKADKFVKYWQAKHIGADIKVKGLSDPSKFNSTMSTYIDFKKIFGDQLNDVNRQR

SEQ ID NO: 505 - protein, 544 aa, Lactobacillus delbrueckii
MTGCADYDVDHIMPQSFVKDDSLDNRVLVARAVNNQKSDKVPALLFGNKVVADLGITVREMWDKWQKLGMISKRKLSNLLTDPDALTEYRAQGFIRRQLVETSQVIKLTATILQSEFPDSKIIEVPAKYNSIVRKQFDLYKSREVNDFHHAIDAYLSTIVGNYLYQVYPNLRRMFVYGEFKKFSSNAEESAHDVARRVKSMNFLDDLLRGTHGDNIYCRSTGEIVFNRNDIISKLKQAYSFKQMLVTQEVFTKKSALFDQTVYPSPERDSKKRSGLIPRKKGMDTEIYGGYSGNKDAYFVLAEAVKEKGHTLQIVGVPIRALNTLKNSANYSEKLLEIIKPQVMFNKDTGKPIKGIKDVKILMDKIPCRQPVLEGESYYMLASSKYRYSLKQISLSQMSMKYILDYIDDPNFNKHEMINIDQQDEKECLLSVYDEILEKMDKYLPLFDIRSFRKKLHDGRDAFIALPVASEEKKPGEVDVIRKILKGLHANADITNLAELGFGTAALGALVSTGGIKISDDAVFIYQSPTGLFERRVKVSDLLK

SEQ ID NO: 506 - protein, 1356 aa, Lactobacillus farciminis
MTKKEQPYNIGLDIGTSSVGWAVTNDNYDLLNIKKKNLWGVRLFEEAQTAKETRLNRSTRRRYRRRKNRINWLNEIFSEELAKTDPSFLIRLQNSWVSKKDPDRKRDKYNLFIDGPYTDKEYYREFPTIFHLRKELILNKDKADIRLIYLALHNILKYRGNFTYEHQKFNISNLNNNLSKELIELNQQLIKYDISFPDDCDWNHISDILIGRGNATQKSSNILKDFTLDKETKKLLKEVINLILGNVAHLNTIFKTSLTKDEEKLNFSGKDIESKLDDLDSILDDDQFTVLDAANRIYSTITLNEILNGESYFSMAKVNQYENHAIDLCKLRDMWHTTKNEEAVEQSRQAYDDYINKPKYGTKELYTSLKKFLKVALPTNLAKEAEEKISKGTYLVKPRNSENGVVPYQLNKIEMEKIIDNQSQYYPFLKENKEKLLSILSFRIPYYVGPLQSAEKNPFAWMERKSNGHARPWNFDEIVDREKSSNKFIRRMTVTDSYLVGEPVLPKNSLIYQRYEVLNELNNIRITENLKTNPIGSRLTVETKQRIYNELFKKYKKVTVKKLTKWLIAQGYYKNPILIGLSQKDEFNSTLTTYLDMKKIFGSSFMEDNKNYDQIEELIEWLTIFEDKQILNEKLHSSKYSYTPDQIKKISNMRYKGWGRLSKKILMDITTETNTPQLLQLSNYSILDLMWATNNNFISIMSNDKYDFKNYIENHNLNKNEDQNISDLVNDIHVSPALKRGITQSIKIVQEIVKFMGHAPKHIFIEVTRETKKSEITTSREKRIKRLQSKLLNKANDFKPQLREYLVPNKKIQEELKKHKNDLSSERIMLYFLQNGKSLYSEESLNINKLSDYQVDHILPRTYIPDDSLENKALVLAKENQRKADDLLLNSNVIDRNLERWTYMLNNNMIGLKKFKNLTRRVITDKDKLGFIHRQLVQTSQMVKGVANILDNMYKNQGTTCIQARANLSTAFRKALSGQDDTYHFKHPELVKNRNVNDFHHAQDAYLASFLGTYRLRRFPTNEMLLMNGEYNKFYGQVKELYSKKKKLPDSRKNGFIISPLVNGTTQYDRNTGEIIWNVGFRDKILKIFNYHQCNVTRKTEIKTGQFYDQTIYSPKNPKYKKLIAQKKDMDPNIYGGFSGDNKSSITIVKIDNNKIKPVAIPIRLINDLKDKKTLQNWLEENVKHKKSIQIIKNNVPIGQIIYSKKVGLLSLNSDREVANRQQLILPPEHSALLRLLQIPDEDLDQILAFYDKNILVEILQELITKMKKFYPFYKGEREFLIANIENFNQATTSEKVNSLEELITLLHANSTSAHLIFNNIEKKAFGRKTHGLTLNNTDFIYQSVTGLYETRIHIE

SEQ ID NO: 507 - protein, 1313 aa, Lactobacillus fermentum
MHYLDEIFAPHLQEVDENFLRRLKQSNIHPEDPAKNQAFIGKLLFPDLLKKNERGYPTLIKMRDELPVEQRAHYPVTNIYKLREAMINEDRQFDLREVYLAVHHIMKYRGHFLNNASVDKFKVGRIDFYKSFNVLNEAYEELQNGEGSFTIEPSKVEKIGQLLLDTKMRKLNRQKAVAKLLEVKVADKEETKRNKQIATAMSKLVLGYKADFATVAMANGNEWKIDLSSETSEDEIEKFREELSDAQNDILTEITSLFSQIMLNEIVPNGMSISESMMDRYWTHERQLAEVKEYLATQPASARKEFDQVYNKYIGQAPKERGFDLEKGLKKILSKKENWKEIDELLKAGDFLPKQRTSANGVIPHQMHQQELDRIIEKQAKYYPWLATENPATGERDRHQAKYELDQLVSFRIPYYVGPLVTPEVQKATSGAKFAWAKRKEDGEITPWNLWDKIDRAESAEAFIKRMTVKDTYLLNEDVLPANSLLYQKYNVLNELNNVRVNGRRLSVGIKQDIYTELFKKKKTVKVSDVASLVMAKTRGVNKPSVEGLSDPKKFNSNLATYLDLKSIVGDKVDDNRYQTDLENIIEWRSVFEDGEIFADKLTEVEWLTDQQRSALVKKRYKGWGRLSKKLLTGIVDENGQRIIDLMWNTDQNFMQIVNQPVFKEQIDQLNQKAITNDGMTLREWVESVLDGAYTSPQNKKAIWQVVRVVEDIVKAVGNAPKSISIEFARNEGNKGEITRSRRTQLQKLFEDQAHELVKDTSLTEELEKAPDLSDRYYLYFTQGGKDMYTGDPINFDEISTKYDIDHILPQSFVKDDSLDNRVLVSRAENNKKSDRVPAKLYAAKMKPYWNQLLKQGLITQRKFENLTMDVDQNIKYRSLGFVKRQLVETRQVIKLTANILGSMYQEAGTDIIETRAGLTKQLREEFDLPKVREVNDYHHAVDAYLTTFAGQYLNRRYPKLRSFFVYGEYMKFKHGSDLKLRNFNFFHELMEGDKSQGKVVDQQTGELITTRDEVAKSFDRLLNMKYMLVSKEVHDRSDQLYGATIVTAKESGKLTSPIEIKKKRPVDLYGAYTNGTSAFMTIIKFTGNKPKYKVIGVPTTSAVGLKRVGKPGSESYNQELHRIIKSNPKVKKDFEIVVPHVSYSQLIVDDDCKFTLASDTYQHPATQLVLSKESMEIIADDFKFVKENTATADEQLVRVFDEIVNQMNHYFTIFDQRSNRQKVTKARDKFVSLPTESEYEGAKKTQVGKTEVITNLLMGLHANSAQGDLKVLGLSTFGFFQSSGGLNLSEDAMIVYQSPTGLFERRICLKDI

SEQ ID NO: 508 - protein, 1327 aa, Lactobacillus florum
MTEQQQPYNIGLDIGTSSIGWAVTDQNDKLLHIRGHNGIGVRLFKEGESAAERRGFRTTRRRLSRRRWRLRFLDRIFDAELAKVDPNFLARLKQSNISPLDPNKQMFGNILFDDPQFDDQKFHQQYPTIYHLRSALAQPDAPQADVRLIYLALHHMIKFRGHFLNGAAVEKFHGGQLHLESEFQELNQIFSNQQRDHVQLQTSSLDEVATILKDNQRTPSDRQRELSARLFVPVDKTIDKENKKLATELLKAVLGLKAKFDVILGVEATDPQAFKLQFSSDDFDDKIAELASELTDEANEILTVLQRLYFSLNLADILTNRQTKQVADSISTAMINRYDDHKHHLKMLKELEAQVTQEQRDGLKKAYDEYIDGDKPTIDTFYTNIKKNLDDSELANQIKSLIDLQAFMPKQRSKENGSIPHQLHQRELDQLIEVQGKYYPWLLAAKDKLDALIAFRVPYYVGPMIDPNQSDDPQNTKFAWMVRKEAGEITPWNFEEKVDKTSSATNFIKRMTTTDTYLLGEPVLPKNSLLYQQFTVLNELNKLKVNGKALTVDQKKYLYEHVCKKQRRVTLKKLSDCLMARGDFPMGAIFTGTTDQKNMNNTLKTYQDFQEIFGDEIDNPDRQVDFEKMIEWSAIFEDREIFKLKLAELNWLTSEQLERVSKKRYQGWGRLSQKLLTHIVNENGERIIDQLWNTNQNFMEIMGQDSVKQAIQEHNGANVAQTGINETIDELYTSPQNKKAIRQILLVVDDIKKAVGYAPANIMMEFAREDRDDHRLIASRARQLEKTYQEISKNWFDNESVTQELKDQIKNKTKFTDRLYLYFIQGGIDLYTGHPLNIDQLSSYDIDHILPQSFLLDNSLNNRVLTSQAENRVHKEDRLPGETVANKMRPTWKMMREQGLMTQRKYNNLTLKPDQISKFNNRGQFINRQLVETRQVIKLAADIMSQKYQADQTKVVTVKANLTHHMREKFNFYKSRNVNDYHHAFDAYLTLFVGNWLLKEYPKLQPYFVYGDFAKTGTNNLKSFNFLYRFERDHKLNDKGAIDTDKDQQLGYMKRIYRFKKMLVTKQLETNEGALYGQTLYPAPKNDKKTRNLINSKKNRPSDIYGGYSNENGSFLTLVKLKKGSKYDYRLVAVPVSKISEIKESELATIEKAIAPQFLKSSGKYRDFQVVLSKILINQKVIDDGMIFTIGSKSYKHNAKQVVLSDNSIQIVSTLSRISDKEKLITVFDEIVDITSKYLPWYKVNDVEKTKMLFRQMQDIDEMKKIIDNSLIGLHCNASITDLGKVGLSKYWGRFVLTAGISLTVDAQLIYQSPTGLFEHRVKVSDL

SEQ ID NO: 509 - protein, 1386 aa, Lactobacillus hominis
MTKITEDYIVGLDIGTNSCGWVAMDSKNTILRMHGKTAIGSHLFDAGNSAADRRAFRTTRRRIKRRKWRLKLLEEIFDSHLAKVDPYFFARLKESGLSPLDTRKNVSSIIYPTSLEDKKFYVDNPTIYHLRYKLMTEDRKFDLREVYLAIHHIVKYRGNFLYNTPVKAFEASKIDVKGSLKKLNELYEGLDSEFNVELDSNNALEIENIIRDKKIFKINKVKEINQLLSLKTEDKERTKLMKDVSKQIVNAILGYKTKFETILLKDVSKDEADDWEFKLTDVDADNKFENLIGDLNENEQEILLVIRKLANAITLSNIVEEGKTLSESMKDKYKKHSDDLKLLKQVISDHPDRDKAKKLALAYDLYVNNRHGKILQAKDILEKKKTLSKEDFYKEIKKNLDDSKESQEILDAISLDSFMPKQRTNENGVIPYQLHQLELDKIIENQGKYYPFLKEVNPVSSHLKQAPYKLDELIRFRVPYYVGPLISPNESTKNKQTKKNQNFAWMIRKEQGQITPWNFDQKVDRMASANKFIKRMTTIDTYLLGEDVLPANSLLYQKFTVLNELNNVKINGKRISVPLKQELYNNLFKKNSTVTTNKLKSYLKENYKLIKVEIKGLSDEKKFNSGLTTYNKLKNLKIFDQQIDDPNYNKDFERIIEWSTIFEDKAIYKEKLKTIDWLSDRQIDKLSKIRMQGWGQLSKKLLSQLTDNNGQTIIEQLWDSQNNFMQIVNQADFKDAIAVANQNLLVDTSVEDILNEAYTSPANKKAIRQVVKVVDDIVKATSGKVPKQIAIEFTRDADDNAKISQSRANKLRKVYKEMSNELASETIRNELERVAKDQKLLKDKHYLYFMQLGRDAYTGELIDIDNLEQYDIDHVLPQSFIKDDSLENRVLVKKAVNNGKSDNVPVKLYGNRMATDLGMTIRHMWEKWKEQGLITKTKYNNLIIDPDKINKYESSGFIHRQLVETSQIIKLVSTILQSKYPDTEIIVVKARYNHYLRKRLNLYKSREVNDYHHAIDAYLSAICGNLLYQVYPYLRPFFVYGQYKKFSSEPEKEKIIYDKTRRYNFISQIFENKDNDIISRETKKKVFDKKDIIEKLKRAYNYKYMLVSRETETHDQEMFKMTVYPRLSRDTKKSRNLIPKKKDMPTEIYGGYTNNSDAYMIIARINKKKGPEYRVFGVPMRELVNLRKAEKNGHYKAYLKQVLEPEIMYSKNGKKNKTISSFEIVKAKVPYKQVILDGDKKFMLASSTYVQNAKQLTLSQYSMQAITDNCENDTEEEKALVEAYDEILTNIDKYLPLFDINKFREKLHAGREKFVDLPLAEKKETILQVLNGLHDNAVMPKIKSLGLSTPLGFMQFHTGVSLSENAKLIYQSPTGLFEKRLKISDL

SEQ ID NO: 510 - protein, 270 aa, Lactobacillus iners
MITYLKDNDDITLSFPKDQLINIFKNSNLNSTEKSDQLKPFFGRTNLEKGIIKLLSGGKQDLSNMFRDETLKNSNYKNLKFSDNRFDDERDGYAADLGDRIDLLILLKQIYDASILESMMSQARVSIDGHKYISSAKVCAYEKHKSDLKRLKSLIKKYLPSEYNNIFRKITEKDNYVAYSKSNITNNKREKALKYVKYVDFTKYLTKKLKTIKTQDAEDDQEIFEIKGELEKQSFLPKQRTLDNSIIPYQLHLMELKKYLIINLNIMTFC

SEQ ID NO: 511 - protein, 255 aa, Lactobacillus iners
MITYLKDNDDITLSFPKDQLINIFKNSNLNSTEKSDQLKPFFGRTNLEKGIIKLLSGGKQDLSNMFRDETLKNSNYKNLKFSDNTFDDERDGYAADLGDRINLLILLKQIYDASILESMMSQARVSIDGHKYISSAKVCAYEKHKSDLKRLKSLIKKYLPSEYNNIFRKITEKDNYVAYSKSNITNNKREKALKYVEYVDFTKYLTKKLKTIKTQDAEDDKEIFEIKGELEKQSFLPKQRTLDNSIIPYQLHLME

SEQ ID NO: 512 - protein, 343 aa, Lactobacillus iners
MLAKDDQEGITVKDKIISLLTFRLPYYIGPVNPAVHGKFAWVKRLANGKVTPWNYKEKIDIDASHEEFIKTKLSKCSFLIGCDVLPKNSLLYQKYMVLSELNTIKFNGVNISEKLKDDIYQNLFKNIQKVTKKRLQNYIKEHENIIGDVIVTGIDNAFKQGLVSYLKFKKIIGDKIDDDRYQKVLEKIIRDITLYDECAGKKIKKEYKDSDLFTEDELNKIVKLTFNDWGRLSAELLDQLEGEDTVSGETGKIIEFMQKHNYNLMQLMSKKFTFKYKIDEINKSYYQHDKFNYKSMIDSLYVSPATKRILWQSLKVVHEISKIMKHDPEKIFYRNGTFQRRSS

SEQ ID NO: 513 - protein, 447 aa, Lactobacillus iners
MLYDHKLIGDKKYARLIRSKAFTDDELAGFIARQLVETRQATKETADLLKRLCPKSRIVYAKAQNASIFRQKFDIPKSRTINDLHHAQDAYLNIVVGNIFDTKFTQDPRNFIKNTKDSRNYNLEKIYDYNVERNNYVAWIAPDSKTNGTIANVKCNLSTKDFRVTRPSFYKKGALFNQNLSRKGSNLAPIKEHSPKSNPLKYGGYSGKNNSFFVVVAGKDNKGKDIVKLIPVNTLIYNKMLHCDYKAKQELLTSYVANNFAINNFRIVKDDIKMYSLVKIDGAYYYLVGGTDERIEVKNAMQLLLSKDSIKAVKILEKESKDQFANIKNYKDIDIKLGRTFNEVISKYTNSVFGKSMLISDKYRKDIFKSVDKSILEFNSLNTIAKADNLLKFVTSMRPAGSVDALKMVGLIERIRKSNVISNFNEFKLINQSVTGLFENEEDLLKL

SEQ ID NO: 514 - protein, 667 aa, Lactobacillus iners
MQKHNYNLMQLMSKKFTFKSKIDEINKSYYQHDKFNYKSMIDSLYVSPATKRILWQSLKVVHEISKIMKHDPEKIFIEMARSKEDHPKRKLSRKADLKQVYKDSKKQIISIIGKDKYQDLSNELDNKDDRDLRWDNLYLYYTQLGRSMYSLKPIDISELMNKNLYDQDHIFPKSKKYDDSIENRVLVEKELNVKKSDIYPISDANIIPQKIKGQVESFWKMLYDHKLIGDKKYARLIRSKAFTDDELAGFIARQLVETRQATKETADLLKRLCPKSRIVYAKAQNASIFRQKFDIPKSRTINDLHHAQDAYLNIVVGNIFDTKFTQDPRNFIKNTKDSRNYNLEKIYDYNVERNNYVAWIAPDGETNGTIANVKCNLSTKDFRVTRPSFYKKGALFNQNLSRKGSNLAPIKEHSPKSNPLKYGGYSGKNNSFFVVVAGKDNKGKDIVKLIPVNTLIYNKMLHCDYKAKQELLTSYVANNFAINNFRIVKDDIKMYSLVKIDGAYYYLVGGTDERIEVKNAMQLLLSKDSIKAVKILEKESKDQFANIKNYKDIDIKLGRTFNEVVSKYTNSVFGKSMLISDKYRKDIFKSVEKSILEFNHLDTIGKADNLLKFVTLMRPSGSAHSLKMVGLIERIRKSNVISNFNEFKLINQSVTGLFENEEDLLKL

SEQ ID NO: 515 - protein, 1395 aa, Lactobacillus jensenii; identical to SEQ ID NO: 128

SEQ ID NO: 516 - protein, 1382 aa, Lactobacillus mucosae
MDIGTNSIGWTAIDDHFSLLRVKGKNAIGVRTFKEGETAADRRGFRTARRRLSRRRWRLQFLDEFFAPYLAEVDPNFLARLKQSDISAKDPAKNQEYMGKLLFPDQEAASDGNGYPTLIQMRKAMPAEKAADFPVFNIYQLRYALMNEKRKFDLREIYLAVHHIVKYRGNFLNNTSVDKFKADQIDFNKSFETLNDLFRQVQPIAPFQIDLTKVDELGKLLLDTKQKKLDRQKAVAKLLPLIEDGTDKEIVKAHQQTAREISKLILGYKAKVGLILQNNLDQTLDMSTENSDDQLMQIAEELDDYQMELINQLSLLYSQIMLNEIVPNGETVSASMLNRYYKHRCQLKELKDYGAAQDKKTREQLDHLYAEYIGQIPKDSKFDFTKDLKKLMDKSDLGQKIKDEIEAGDYLPKQRTSANGVIPHQMHQQELDQIIENQKEYYPWLAEPNPVEKNIKNAKYKLDQLVSFRVPYYVGPMITLADQQKTSKASFAWAVRKKAGKITPWNFYDMIDREKSANNFIKRMTNKDTYLLSEDVLPASSLLYQKFTVLNELNNIRVNGRKLQPALKQAIYTDLFQKRKTVNLKTLTNFLAIHEPTLTKPKIEGLSNGRSFNSSLGTYIDMSKILGDSLDDLNYRDDIEKIIEWSTVFEDSEIYGVKLQEIQWLTNEQREKLVRKRYQGWGRLSKKLLTGITDENGQRIIDLMWDTSKNFMQIVHQPVFEEQIAELNQQLLQDADKAPLEVVDDILADAYTSPQNKKAIRQVVKVVADVVKAVGNAPASISIEFARNEDRNKELKNSRRHSIEKLYHETAEKLVKQTNLLEELGNVKDLNDRYYLYFTQAGRDMYDGTPINIDEISTHYEIDHILPQSFLKDNSLDNRVLVKKSENAAKSDRVPAKLYGAKMRAFWKQLKESQLISNRKYLNLTTDPEQVDKYQMQGFVHRQLVETRQIIKLAANIFGSLYPDSAVIETRAELTKQLREKFSLYKVRDVNDYHHAVDAYLTAFAGHYLYQRYPKLRPMFVYGDYAKIYADDLKRLRSVNLFHDLEKDQYNSGTAVNPETKEKIVDVDWLSDYVSKIQHFKYMLISKAVYTQHGQLYGATILPVAQVDKISAPIGIKDDKPVDIYGAYTNEVAAYMAIVRVNGKKPKYKVVSVPVRMLQRLKMAEQKGHDQYMQTLHDVLLRNFTSLKKNRKTGLKEAVVKDFDVLVPCVRYNQLVIDGDTKFTLGSATYQHNAKQLVLCNHSLETLANNFEYVRKHPDEADERMIMLYDDILDQVNHYFTLYDKNKFREKLNAGRDKYLKLPTFSQFENNKKTAIGKSEAIINILRGLHANAAITNLKCLGVSTPFGQLQSPSGIELSENAKLVYQSPTGLFSREVLLKDL

SEQ ID NO: 517 - protein, 1382 aa, Lactobacillus pentosus
MKKIVNYNLGLDIGTSSIGYAAIDDQGRPVRHQNKTVMGVRLFKEGKTAESTRIFRGTRRRLSHRHWRLGYLDRIFDNEIAKVDENFLPRLKASKRARSDEKRSFRGSLLFPETGDDAYYQKYPTIYHLRYALITQKKQFDIRLIYLALHHMIKYRGNFLDTTPVSAFNIHDIDLTDQFASLNDCYQLLDMDFEFQFDLNNIEQVQKLLLDETLSKTKRQAAVSKVLVMSTGNKAFDDQQNGIASEFIKALLGGPFDLSKILNLSVADVKSWKLHMTDKDVDDTLNSLVEELDENHKQIVNLLQMIYSQVMMLGLLNGQQSISASMIERYDDHAKHWAALKKLLPALGEQEQSTIIHAYTAYTGHSRTKQLSRAEFYTKVNSILKKHENIAEATGLIELIDRNEFMPKQRDAVNGVIPHQLHQRELQLIIQNQQKYYPFLAAKAYPDADETMIEQLLSFRVPYYAGPLVDRDFINESSDQEQAMQNTKFSWLKRREAGEITPWNFEQKVDVQETANRFIKRLTTKDTYLMTEDVLPKESLIYQRFEVLNELNAIRINDRRLTAENKQLAFQQLFMAGNTKNVSIKKFRNFVFDSLKFPEKVKITGFAGQHNFLAKLSTYHDFKKIFGERVDHTDLQPDFERIVEWCTIFEDRHIYREKLKEIQWLSQSEIDQLVLIRNHGWGRLSKRLLTGIRDSDGRTVMDQLWFGTDNFMRIISQSDFAAAIANENRTQLNQHGLEDVLDSAFMSPQNKKAIRQVLKVVDDIEQTLGCPPKKVMIEFTRSPDKKKQRTVTRLEKVQQAYKAVADQLAGQSIVSELDQYANTHSKLSDTYYLYFMQLGRDLYSGKPIDIDSPMLDDDHILPRAFMKDNSLDNRALTEKPINNTKAAKFPSKVFGQQKEVTDFWKLLRRCGLMSNIKEKHLYLDPDNVDKWTRRGFIHRQLVETSQVIKIVANILNDRYQQSQTEVLEVPARLGTELRECFGWYKVREVNDYHHVFDAYLAAFIGNYLYRRYPKLQPYFVYGNFAELNKAQLKNIKSFNFLYNITDNKRVVKDIETGQTLWDDQIRQQIQHIYEYKYMLTSHEAFTQHKELYGQTIYPRREFKPGTLKAIKQDQPQELYGGYKNLTAAYMCIVKIQARKRRAAEYRVVRVATESLSALQQAKRLGVQAYERCLRQELVRNNEILRTNADPNSAPREFEVLLDRVLCHQMIISDGQKYLLGSHAYKINCMQLVLSNNSMKILSTSIVKLKQMTNEPLVQVYREILDVVNKYFTLYDVNSFRENLNQFFDKFRTLPITNEYESSKSGKKLIHRGQLETLTLILRGLHANSDKVQYGDQSTLLGGFQTKDGIKLSKDSVIQYTSPAGLNVRTVKLRDLEQKEAQK

SEQ ID NO: 518 - protein, 1361 aa, Lactobacillus pentosus
MNEPYGVGLDIGTNSVGWTVVDMNGRVRKVKGKTALGARLFKEGATAEDRRGFRTTRRRLKRVKWRLRLLREFFDQPISKIDPNFFARRKYSDISPRDPNYNGLAKTLFNDRTDKEFYDDYATIYHLRDKLMTSNRKFDIREIYLAIHHIVKYRGNFLRTGPASQYGSASLHLATSFQKLNDLFAQSEETLNLKLVTDEALLQQIQQILVRTDLSRSEQQRQIWPLMAVLTGASAAEKKRQKNVVVELSKALVGLKAKMNVVTLTEVDAAVVKDWTFTMEESQDKLPEIEEQLSEVGQQIMDEVIQLYASVNLAQLIPAGKRFSQHMVEKYKHHEKNLELLKAYIHSQSDSKRGREIRATYDRYIDGVDSKPVTQEMFYKDLMKYVEADATSNHLAAEIKDEIDSEQFMPKLRTKQNGSIPYQVQQYELDQIISHQKKYYPWLGEENPVAERRGKFPYKLDELVGFRVPYYVGPLITKEDQQATSGAGFAWMVRKADGPITPWNFDQKVDRIASATAFIQRMQTTDTYLIGEDVLPARSLIYQRFMVLNELNNMRVEDRKLAPQQKQRLYNQVFKQHQHVSVKNIQQNLMDAGEYRKTPQITGLADPKGFNSSLSTYHDFKKILLEAIADEHKRADIEKIILWSTTFEDSAIFKQKLEEVAWLTDAQRKQLSGLRYRGWGQLSHKLLTAFKDDKGRSIMDGLWETSDNFMQLRKQPAIETQIKEANQANLTDADIQDTINELYTSPQNKKAIREVMLVLDDIKNAMHGQTPSWIFVEAARGGGVAGRRTQSRSSQIVEAYKGTAKEIVSEKVQHELNEKIKAKADFNTRLVLYFLQNGRDLYTNEAINIDRLSEYDIDHILPQSLVKDDSLDNRVLTSARINREKNDTFASEKFGRKMGAQWRELHRNGLMTQRKLKHLLMRPDEISKHATDFINRQLVETRQVIKLVEELISSEYPAASIVAVKANLTHQFRQTFNFPKLREVNDYHHAFDASLTAFIGMYLLKQYPKLERFFVYGKFAKQPINLTRFNIIRKLAVAEKPIANIETGEILWDKTADIKYFEKLYNYKRLLVTHEVRENYGAMFKQTLFKASYNKSKTLVPKKNHMETSVYGGYSNQETAYLAIVRIPFKSGFKFIVVGIPTRMVAKIKHYQSLGATLNQATHKVIEPKFTKISRKTKQTVISDYEVVLPKVYLDQVVRDQVKGQMYRFSLGSDKEYHNVQELYLPLSIQQAFVGHYDESDDQRSNDLVKVYDAALKQLQRYFPLHLSRNFDQVASQAHQSFEGLKNNVQTSDKQLGKKEVLNSLFVGLHANATRSNLSVLGMSKDFGRIKSNGITLTDQAEIIYQSPTGLFERKVALKDL

SEQ ID NO: 519 - protein, 1358 aa, Lactobacillus pentosus
MNEPYGVGLDIGTNSVGWTVVDMNGRVRKVKGKTALGARLFKEGATAEDRRGFRTTRRRLKRVKWRLRLLREFFDQPISKIDPNFFARRKYSDISPRDPNYNGLAKTLFNDRTDQEFYHDYPTIYHLRDKLMTSDRKFDIREIYLAIHHIVKYRGNFLRTGPASQYGSASLHLATSFQKLNDLFAQSEESLNFKLVTDEAQLQQIQQILVRTDLSRSEQQRQIWPLMVVLMGATAAEKKRQKDFAKELANALVGLKAKLNVVTLTNVDTTVVKDWTFTLEESQDKLPEIEEQLSEVGQQIMDEVIQLYASVNLAQLIPAGKRFSQHMVEKYNHHEKNLELLKAYIHSQSDSKRGREIRATYDRYIDGVKSKPVTQEMFYKDLMKYVEADATSNHLAAEIKDEIDSEQFMPKLRTKQNGSIPYQVQQYELDQIISHQKKYYPWLGEENPVAERRGKFPYKLDELVGFRVPYYVGPLITKEDQQATSGAGFAWMVRKADGPITPWNFDQKVDRIASATAFIQRMQTTDTYLIGEDVLPARSLIYQRFMVLNELNNMRVEDQKLAPRQKQRLYNQVFKQHQHVSVKNIQQNLMDAGEYRETPKITGLADPKGFNSSLSTYHDFKKILPEAIADEHKRADIEKIILWSTTFEDSAIFKQKLEEVAWLTDAQRKQLSGLRYRGWGQLSHKLLTAFKDDNGRSVMDGLWETSDNFMQLRKQPAIETQIKEANQANLTDADIQDTINELYTSPQNKKAIREVMLVLDDIKNAMHGQTPSWIFIEAARGGGVAGRRTQSRSKQIVEAYKSTAKEIVSEKVQHELNEKIKAKADFNTRLVLYFLQNGRDLYTNEAINIDRLSEYDIDHILPQSLVKDDSLDNRVLTSARINREKNDTFASEKFGRKMGAQWRELHRNGLMTQRKLKHLLMRPDEISKHATDFINRQLVETRQVIKLVEELISSEYPSASIVAVKANLTHQFRQTFNFPKLREVNDYHHAFDASLTAFIGMYLLKQYPKLERFFVYGKFAKQPINLTRFNVIRKLAVAEEPIANIETGEILWDKTADIKCFEKLYNYKRLLVTHEVRENYGAMFDQTIFKATDSRKRLIQKKKGFATETYGGYTGRTLAYLAIVKVVTNKDTQYQVVGIPTTMVTQIQQLEASGLTSKQAVTKAIGAMINENNKKLQSYEVLLPKVRFEQVVRDEVKGHIHRFALGTDTYYHNIQELYLPLTIQRAFLGKRNDTDAQTEQNLLTVFETTLAQVNRYFPLYEMNKFKQILNSAQEKFAALPTKNKTVKNKLVTGKDGVLNNLFIGLHANASLGDLKILGMKIGFGKLQVPGGLKLTDQAEIIYQSPTGLFERKVALKDL

SEQ ID NO: 520 - protein, 1358 aa, Lactobacillus plantarum
MKEPYGVGLDIGTNSVGWTVVDASGHVRKIKGQTGIGVRLFKEGAAAADRRGFRTTRRRLKRVKWRLRLLREFFDQPISKVDINFFARRKYSDVSPRDPNYNGLEKTLFNDRSDQDFYHDYPTIYHLREALMTQHRKFDVREIYLAIHHIVKYRGNFLRNDAATAYRSGTLDLQQHFETLNHLFSQADLELNLNLTTDVALLDSIKQTLVRTDISRSDRQKLIMPLLAVLTGATTAEKKRQKAVVTEFAKALVGNKTKIDVLTLTDIDATEAKDWAFSLEENQDKLPGIEDRFSEVGQQIIDEVIRLYASVNLAQLIPEGKRFSQSMVEKYKRHGEDLKLLKAYIRSQSDAKRGRAIRATYDQYIDGVKSKQVTQEAFQKALGKFVDADVDLNSWAAQIKQAIDSEQFMPKLRTKQNGAIPYQVQQNELDQIISNQKEYYPWLGEENPVIKRRGKFPYKLDELFGFRVPYYVGPLITKEMQAATANAGFAWMVRKADGPITPWNFDDKVDRVASATAFIQRMQTTDTYLIGEEVLPARSLIYQRFMVLNELNNIRVDDGQLTPRQKQRLYNQVFKKHKRVTAKNIQDNLVAAREFPTAPRITGLADPKVFNSSLSTYHDLKQVLPEAMSDVRKQADIEKIILWSTIFEDSTIFKQKLTEISWLTAAQLKQLGQLRYRGWGQLLRKLLTGLKDDNNRSIMDGLWETNANFMQLRSQPAIENQIKSANQANLTTADLQDTINELYTSPQNKKAIREVMVVLADIKDAMHGQTPNWIFVEAARGGGVAGRRTQSRSKQIVAAYQGTAQAIVRDQVQRELKEKIKNKANFNTRLVLYFLQNGRDLYTGDAINIDRLSEYDIDHILPQSLVKDDSLDNRVLTNARINREKNDTFASEKFGKKMGAKWKEMHRMGLMTKRKLDHLLMRPDEISKYATGFINRQLVETRQVIKLVEELINAEYPSTAIVSVKANLTHQFRQTFDFPKIREVNDYHHAFDAALTAFIGTYLLKRYPKLERFFVYGKFAKQPVNLTRFNVIRKLAKTDTPITDIDTGEVLWDKLTDIKYFETLYDYKRLLVTREVSENYGAMFDQTLLKASDNGKRLIRKKQSFDTAIYGGYTGKTLAYMAIVKVSTKKDVQYQVVGVPTTMVTQIEQLEQQGMTNKQAVTKVIEPLIAANNKKMLTYEVLLPKVRFEQVVRDRIKGQTHRFALGTDTYYHNIQELYLPLTLQRAFLGKQNESEVQLNQNLLTVFDATLAQVNRYFPLYEMNKFKKILNSARDQIELLEAKNQFVKNKLVLGKQGILTNMFIGLHANASYGDLKVLGVKIDFGKLQVPGGIKLTGDAEIIYQSPTGLFERKIALKDL

SEQ ID NO: 521 - protein, 1361 aa, Lactobacillus rhamnosus
MTKLNQPYGIGLDIGSNSIGFAVVDANSHLLRLKGETAIGARLFREGQSAAERRESRTTRRRLSRTRWRLSFLRDFFAPHITKIDPDFFLRQKYSEISPKDKDRFKYEKRLFNDRTDAEFYEDYPSMYHLRLHLMTHTHKADPREIFLAIHHILKSRGHFLTPGAAKDFNTDKVDLEDIFPALTEAYAQVYPDLELTFDLAKADDFKAKLLDEQATPSDTQKALVNLLLSSDGEKEIVKKRKQVLTEFAKAITGLKTKFNLALGTEVDEADASNWQFSMGQLDDKWSNIETSMTDQGTEIFEQIQEHYRARLLNGIVPAGMSLSQAKVADYGQHKEDLELFKTYLKKLNDHELAKTIRGLYDRYINGDDAKPFLREDFVKALTKEVTAHPNEVSEQLLNRMGQANFMLKQRTKANGAIPVQLQQRELDQIIANQSKYYDWLAKPNPVEKHRASKPYQLDELLTFRIPYYVGPLITPKEQAESRENVFAWMIRKDPSGNITPYNFDEKVDCPASANMFIQRMKNTDTYLIGEDVLPKRSLLYQKYEVLNELNNVSIDGRRLGADQKQRLIREVFERHSSVTIKQVAENLVAHGDFAKRPEIRGLADEKRFLSSLSTYHQLKKILHEAIDDPTKEHDIENIITWSTVFEDAAIFKTELAKISWLDSDTIKALSNIRYRGWGQFSRKLLDGLKLGNGHTVIQELMLSNHNLMQILTDETLKTTMAELNQDKLKADDIEDVINDAYTSPSNKKALRQVLRVVEDIKHAANGQDPSWLYIETADGPGTAGKRTQSRQKQIQTVYANAAQELIDSAVRGELEDKIADKASFTDRLVLYFMQGGRDIYTGAPLNIDQLSHYDIDHILPQSLIKDDSLDNRVLVNATINREKNNVFASTLFASKMAATWRKWHEAGLISGRKLRNLMLRPDEIDKFAHGFVARQLVETRQIIKLTEQIAAAQYPNTKIIAVKAGLSHQLREELDFPKNRDVNHYHHAFDAFLAARIGTYLLKRYPKLAPFFTYGEFAKVDVKKFREFNFIGALTHAKKNIVAKDTGEIVWDKERDIQELDRIYNFKRMLITHEVYFETADLFKQTIYAAKDSKERGGSKQLIPKKQGYPTQVYGGYTRENTAYLAVVKTVEKKADVYRVVRIATSQVAALKEARAQSTVKERELLKKFLTTKFTKIGKNGKKAITPFDIVIPRVPREQLFHNKRYGFFMVNSDTLMHNYQELWMSRSDQQILSKLVKSAKTVENGQVGRLFENIVEQINKYFPLYDINQFRKKLDQSKDIFSKLPLEGNGTTSGKRETIQNILTGAGTGAKNGDLKNLGIKTPFGFLQVPSGIVLDDDTTLIYQSPTGMLNRIVRLSEL

SEQ ID NO: 522 - protein, 1361 aa, Lactobacillus rhamnosus
MTKLNQPYGIGLDIGSNSIGFAVVDANSHLLRLKGETAIGARLFREGQSAAERRESRTTRRRLSRTRWRLSFLRDFFAPHITKIDPDFFLRQKYSEISPKDKDRFKYEKRLFNDRTDAEFYEDYPSMYHLRLHLMTHTHKADPREIFLAIHHILKSRGHFLTPGAAKDFNTDKVDLEDIFPALTEAYAQVYPDLELTFDLAKADDFKAKLLDEQATPSDTQKALVNLLLSSDGEKEIVKKRKQVLTEFAKAITGLKTKFNLALGTEVDEADASNWQFSMGQLDDKWSNIETSMTDQGTEIFEQIQELYRARLLNGIVPAGMSLSQAKVADYGQHKEDLELFKTYLKKLNDHELAKTIRGLYDRYINGDDAKPFLREDFVKALTKEVTAHPNEVSEQLLNRMGQANFMLKQRTKANGAIPVQLQQRELDQIIANQSKYYDWLAKPNPVEKHRASKPYQLDELLTFRIPYYVGPLITPKEQAESRENVFAWMIRKDPSGNITPYNFDEKVDCPASANMFIQRMKNTDTYLIGEDVLPKRSLLYQKYEVLNELNNVSIDGRRLGADQKQRLIREVFERHSSVTIKQVAENLVAHGDFAKRPEIRGLADEKRFLSSLSTYHQLKKILHEAIDDPTKEHDIENIITWSTVFEDAAIFKTELAKISWLDSDTIKALSNIRYRGWGQFSRKLLDGLKLGNGHTVIQELMLSNHNLMQILTDETLKTTMAELNQDKLKADDIEDVINDAYTSPSNKKALRQVLRVVEDIKHAANGQDPSWLYIETADGPGTAGKRTQSRQKQIQTVYANAAQELIDSAVRGELEDKIADKASFTDRLVLYFMQGGRDIYTGAPLNIDQLSHYDIDHILPQSLIKDDSLDNRVLVNATINREKNNVFASTLFASKMAATWRKWHEAGLISGRKLRNLMLRPDEIDKFAHGFVARQLVETRQIIKLTEQIAAAQYPNTKIIAVKAGLSHQLREELDFPKNRDVNHYHHAFDAFLAARIGTYLLKRYPKLAPFFTYGEFAKVDVKKFREFNFIGALTHAKKNIVAKDTGEIVWDKERDIQELDRIYNFKRMLITHEVYFETADLFKQTIYAAKDSKERGGSKQLIPKKQGYPTQVYGGYTRENTAYLAVVKTVEKKADVYRVVRIATSQVAALKEARAQSTVKERELLKKFLTTKFTKIGKNGKKAITPFDIVIPRVPREQLFHNKRYGFFMVNSDTLMHNYQELWMSRSDQQILSKLVKSAKTVENGQVGRLFENIVEQINKYFPLYDINQFRKKLDQSKDIFSKLPLEGNGTTSGKRETIQNILTGAGTGAKNGDLKNLGIKTPFGFLQVPSGIVLDDDTTLIYQSPTGMLNRIVRLSEL

SEQ ID NO: 523 - protein, 1352 aa, Lactobacillus ruminis
MNDNFDLMRVKGKKGIGVRLYNEGQSAAERRMHRTARRRYGRRKWRLRLLEDFFDEHMAEVDDTFFARLKDSNISPKDDKKYRKSLLFPKSKGVTYQDDGEFYKKYPTMYHLRYALMTEHRKFDLREIYLAFHHMVKYRGNFLYDTSVDSFEAKNLDIKGKFDEINDLLSSYTDFYVDNSNAALVESILLEKNTTRKDKSKKIAKLLHVEDKEKGKNKKAKDLATQISNAVLGLKCNFHLIFELQQKYSFDLCSEKTEENIAKLSEVLDENQKMLLMILKEVQDQVMLNAFVPSGMSLSEAMMQKYDDYGEQLKIYHELEHSVSDDSAAKLRGAYRDYNDNIIKRIDGDNKKDTFYKRVKNILTKISKEYVDQDVLESCGKLKKLIDENKLFIRQRTAANGVLPHQLHQIEMRKIIDNQKEYYPWLAEPNPNEKRRVYSKYKVEELIAFRIPYYVGPLVDPNNADKNKEARFSWMVRKKDGEITPWNFYDKVDWAESANNFIERMKSKDTYLLGEDVVPKESMLYQKYEVLNELNNLRINDSGLSDSFEDVKLKQAIYNDLFKKQKIVKITDLQNYLVQNHKYLVKPKISGLADENRFLSSLSTYSDLKTIFGDKVDDRTYFNDFEKMVEYSTVFEDGHDYNQKLDEYTWLTKEEKYKIGKKRYRGWGKLSKKLLTGLRDKNNHTIMDNLWETNRNFMQIQTADEFSKQIAEENERHLKGSVSDAINDMYTSPANKKAIRQVLRVVDDIQKAMGYAPSSISLEFAREDGPSVRTVSRANRMKSIYEKYASEVSEEVMKDLDGVIKDKKGLNDRLYLYFEQQGKDMYSGHPLDFDKVISGQEYDIDHILPQAVIKDDSLDNRVLTTKALNNDVKSKGVPCRMFNGMHSFWKNLYDKGFISRRKFNNLTTNPENIDKYKMKGFVNRQLVETRQIIKLVANVLNDKYQNDDVDIIEVRAELTHDVRKHFKFYKNRNVNDYHHAFDAYLTSFIGHYLFKKYPNLRPLFDYNDFMKVSDNVFKQLRGNNFLGEFLNKTGDIISTDGNFVLNKEEMINKLNKAYAFKKILVTKEVGQRTGAMFNETRYPAPNSRKAALKYRRMPKPDSLISVKDYKNTDIYGGYSGKNDAYMVIVDMGKQYMVVGVPVRYTEKLDKLRIKHSELYRDELRKVLSRDKTLLDSKGNVKRFDIVLDRVLYGQLIEDGNELFTLGSSKYKRNFRQLFLDKQCIEILDSSATPQPTDEELIWVYDQILDKVDKYFELYDINRQRETLRKGRAAFCSLPNISMKKDDVTKKKILNEILVALHANESESNCEKIGKKVFGRLQVPGGIKLSKEAKLIYQSPTGLFERVVYLKDL

SEQ ID NO: 524 - protein, 1339 aa, Lactobacillus salivarius
MERYHIGLDIGTSSIGWAVIGDDFKIKKKKGKNLIGTRLFNEGATAAERRGFRTQRRRLNRRKWRLKLLEEIFDPYMAEVDEYFFARLKSSNLSPKDSNKKYLGSLLFPDKSDSNFYDKYPTIYHLRRDLMEKDEKFDLREIYLAIHHIVKYRGNFLEKVPAKNYKNSGASIGFLLEEVNSLYKDIIGDESIAILNSEKFEDVEKIILDEETRNLDKQKSVGKLLVEDKKKKNIVTAFSKAIFGYKFNIEDLLLIENDEKNKLTFNDENIDDIFNELSHSLDDKQMDLLTKTREIYFKFKLNMIVPTGYTLSESMIEKYEMHKAHLKMYKEFINTLNTKDRKILKNAYSDYINTEKAKAANAQENFYKTVKKIIKDNNSDTAKKIIVLIDEGNFMPKQRTGENGVIPHQLHQIELDRIIENQAKYYPWLAEANPVEKNRKFAKYKLDELVTFRVPYYVGPLIDKTESNKNEKETKFAWMVRKAKGTITPWNFENLVDRTESANRFIKRMTSKDTYIIGEDVLPASSLLYEKFKVLNELNNIKVNEKKLDIEQKQDIYLNLFTTAKNVTKKSLATYLNCSADSISGLSDGEKFNSSLSSYIDLKAILGNIVDDCNKNEDLEKIIEYSTVFEDGNIYKEKLSEISWLTDEQIEKLSNIHFKGWGRLSKKLLTQITNENGERIIDALWNTSNNFMQIINDESIQAKLAEINGKYAGKSDLEDILSEAYTSPQNKKAIRQVMKVVEDIEKAMQCEPTSISIEFTRKKQKSRLTNTRYKKISDVYEKIADEVISEYELRKLQSELDSNANNMRDRYYLYFMQLGRDMYTGEKINIDELHQRYDIDHILPQSFIKDDSINNRVLTRKDVNNKEKSDKTAADLYAVEMSDFWRKLRKQGLITEQKYKNLLTKSDSIDKYAKKGFIKRQLVETSQVVKLVANILQDKYSDTKIIEVRAKLNSNLREEYKLIKNRAVNDYHHAIDGYLTTFIGQYLYKTYPKLRSYFVYNDFKKLDSNYLKHMKKFNFLWQLQDDKTIDIYDNVNNKFVLNVPEMKKYIQKIYNYKYMLVSKEVTTKNGAFYDQTKYNAKTVNLIPIKKNKPTNIYGGYKGKVSSYMMLVKIRKKKEVIYKFVGVPRLWTDELDRLKDTTERKILLNEIAKNSLSKTEQDFEVILDKVYYGQLIIDGNQKYTLGSSEYKYNAMQLHLSKHALEVLAKENVKDAEITDKDLVSVYEEILSVVNKYFELYDINKFRQKLNEGLEIFRKLPVYNVYESNKIKQVGKFEVLNRILMGLHANAMITDLKVLGIKTKLGQMQVNGGIKLSPDAKLIYQSPTGIFSRAVRVKDLG

SEQ ID NO: 525 - protein, 629 aa, Lactobacillus salivarius
MERYHIGLDIGTSSIGWAVTGDDFKIKRKKGKNLIGTRLFKEGNTAAERRGFRTQRRRLNRRKWRLKLLEEIFDPYMAEVDEYFFARLKDSNLSPKDSNKKYLGSLLFPDISDSNFYDKYPTIYHLRRDLMEKDEKFDLREIYLAIHHIVKYRGNFLENVPAKNYKNSGASIGFLLEEVNNLYKDIVGDENVTILNSEKFEDVEKIILDDGIRNLDKQKGVGKLLVEDKKNKNLVTAFSKAIFGYKFNIEDLLLVEGDEKSKLTFNDENIDDIFNELSHSLDDRRMDLLTKTREIYFKFKLNMIVPTGYTLSESMIEKYEIHKAHLKMYKEFINTLNSKDRKILKNAYTDYINNEKAKAANAQENFYKTVKKTIKDNDSDIVKKIIDLIDEGNFMPKQRTGENGVIPHQLHQIELDRIIENQAKYYPWLAEENPVEKNRKFAKYKLDELVTFRVPYYVGPLVDKTESNKNEKETKFAWMVRKSKGTITPWNFENLVDRTESANRFIKRMTSKDTYIIGEDVLPASSLLYEKFKVLNELNNIKVNEKKLDIEQKQNIYLKLFTTTKNVTKKNLATFLNCSIESISGLSDDKKFNSSLSSYIDLKVILGDIVDDYSKNEDLEKIIEYSTIF

SEQ ID NO: 526 - protein, 897 aa, Lactobacillus salivarius
  misc_feature (822)..(822): Xaa can be any naturally occurring amino acid
MLIESDEKNKLTFNDENIDDIFNELSHSLDDNQMDLLTKTREIYFKFKLNMIVPTGYTLSESMIEKYEMHKAHLKMYKEFINTLNAKDRKILKNAYSDYINNEKAKAANAQENFYKTIKKTIKDNNSDTAKKIIGLIDEGNFMPKQRTGENGVIPHQLHQIELDRIIENQAKYYPWLAEENPVEKNRKFAKYKLDELVTFRVPYYVGPLVDKTESNKNEKETKFAWMVRKAKGTITPWNFENLVDRTESANRFIKRMTSKDTYIIGEDVLPASSLLYEKFKVLNELNNIKVNKKKLDVEQKQHVYLDLFTTRKNVTKDNLATSLNCDVESITGLSDNEKFNSSLSSYIDLKAILGNAVDDCNKNKDLEKIIEYSTIFEDGNIYKEKLSEISWLTDEQIEKLSNIHFKGWGRLSKKLLTQITNENGERIIDALWNTSNNFIQIISDESIQAKLAEINGEYADKSNLEDILDEAYTSPQNKKAIRQVMKVVEDIEKAMKCKPTSIAIEFTRRKGKSKLTNTRYKKISETYEKITDELISEYELGKLQSKLDSKANNMRDIYYLYFMQLGRDMYTGEKINIDELHQYYDIDHIFPRSFIKDNSLNNRVLTRKEINNNEKADRTAADLYAVKMGDFWRKLRKQGLITEKKYKNLLTRTDSIDKYTKQSFIKRQLVETSQVVKMAANILQDKYSNTKIIEVRARLNSDLRKEYELIKNREVNDYHHAIDGYLTIFIGQYLYKTYPKLRSYFVYDDFKKLDSNYLKHMDKFNFIWKLEDKKAEDVYDNVNNEFILNVPKMKDYIQKIYNYKYMLISKEVTTESGAFYXZTKYNAKTINLIPIKKDKPTNIYGGYKGKVSSYMMLVKIQKKKEVIYKFVGVPRLWTDELDRLIDTDEKKALLKK

SEQ ID NO: 527 - protein, 1419 aa, Lactobacillus sp.
MAKPQNYTIGLDIGTNSVGWTVTDDQNNILRIKSKKAIGARLFEEGKVAAERRSFRTTRRRLSRRKWRIKLLEELFDEEISKVDPNFFARSHESWISPKDKRERYSAIVFPTPEEDKKFHNEYPTIYHLRDRLMKDDQKHDIREIYVAIHHIMKYRGNFLHDESIETYRSGMSSLGGGDERTILNTKILDDLNDAFADNLATQGISVNSASADQINEIVTSGHLNVDSQKAIAKLLLPTTLSSDDKKQDKKIKKLATDAAKNVASAWLGYKANFAAILNIQEVDKDKKKIYSFALQGADEEDKVETLESVLSQDQIEIVDRIIRIRHAIVLGEIIPVGMTLSEAMIEKYDQHAKDLKNLKTVIRNLKDRKNAVKLQAIYDLYVNNRHADTAKAMKLAGVKKRTELLEPEEFNKSIEKLLDDSPVSAEIKKRIAEKDFLPLQRSNSNGVIPNQLHQIELDEIIKKQSKYYPFLGETNEHASADVARKAPTKLDQLLTFRVPYYVGPLITKEEQEEQDGHSFAWMIRKNPKDHEKITPWNFDEKVDRMASATQFIKRMTTKDTYLLGEDVLPSSSLKYQLFTVLNELNNLRINHKKLTREEKEQVIEDLFKKYKTVKADKFKNYWQKGHAGLDVKIQGMADPEKFNSTMSTYIDLQKIFGDQLDDAQRQNDFEKIIEYSTIFEDRKILGEKLRADFVWLSEDQIKRLCRLRLQGWGRLSLKLLTRLTDADGQNVLERLLNSNDNFMQIVKDPVIKAKIEQKNQKLLRADWSENATESILDEAYTSPQNKKAIRQVMRVVHDIVKACDGNLPAKFAIEFARSQDDDPKRTVARADRLQKIYAQISDEVVSQGVKDQLSGMKSLKDRYYLYFMQGGRDAYTGKPLNIDRLSDYDIDHIMPQSFIKDDSLDNRVLVTRAVNNQKSDNVPVLLYGNHLVADLGITIREMWDRWQKSGMISKRKLANLLTDPATLSEYRAEGFINRQLVETSQVIKLTATILQSEFPDSKIIEVPAKYNSILRKQFDLYKSREVNDYHHAIDAYLSTIVGNYLYQVYPNLRRLFVYGEFKKFSHGEEESSHQAVRRVKSMNFLDDLLRGKHGDDIYCRVTGEVIFSRKDIISKLKQAYSFKQMLVTQEVFTKKSALFDQTVYPSPARDSKTRSGLIPRKQGMDTEIYGGYSGNKDAYFVLAQVVKSKGHTLQVVGVPIRALRALANCSNYSEQLLKIVKAQVLFNKKTGKAKKGISDVRILLDKIPYRQPVLDGSAFYMLGSSTYKYNLKQISLSQQSMKYILDYIDDPNFNKHEMTKIDQQNEKECLLSVYDEILDKMDKYLSLYDINGFRKKLHVGRDKFIKLEVEKQAEAIKNVLRGFHANSDMTKLSDLGLSTSLGFMQASDGIKLSDNAVFIYQSPTGLFERRVKVSDLLK

SEQ ID NO: 528 - protein, 1289 aa, Lactobacillus versmoldensis
MRRRYRRRRNRLNWLDELFADELAKIDPSFLLRMKNSWVSKKESTRKRDPYNLFIDEKYNDVDYFNQYPTIFHLRKELITEDKKVDIRLIYLAIHNIIKYRGNFTLENQNFDISQLSSNFSQQISDFFALFSDFGVIMPEDFDPDKISDILLNPNLSPSGKVSEAIATISPKTNVKAKIKIILLLLVGNNGDLKKLFDLETTEKIAVKLSSRHIDSELPIILSELNEQQENIITIANSIFGSIILKDFLGDETSISAAKVISFEDHKQDLQKLKTMWRETSNKEAVKAGKKAYEDYIGHEDSETFYKKIKKFLEKAQPVDLANKALAEIELENYLPKQRNRNNTVIPYQLNENELIAILDHQEKYYPFLKENRDKILSLLTFRIPYYVGPLQDSNNNRFSWMTRKASGAIRPWNFSEKVNVEQSSNDFIKRMRSTDTYLIGEPVLPKKSLIYQCYEVLSELNNTRVKDGSSNPKRLDVTIKQRIYNEIFKNQKSVSVKVLQNWLIKESYFKSPEISGLADKKKYLSSLSTYIDFKKIFGQRFVDDPVNSPQLEELAEWLTLFEDKKILLIKLQNSKYSYDQATINKLSTMRYQGTGKLSKKLLVDLKTTKKSIGKSGAESLSILDLMWSTKDNFMQIIHDADYTFEQQIKEFNYDTEDELTPLEKVANLHGSPALKRGLNQSIKVVADIVKFMGHDPEKIFIEFTRSDDFSKLTISRYRRIKKQYLEIAKAIKKIPAEFKDIKEYQTQLEENKGKLASERLMLYFLQCGHSLYSNKPIDLNMINSSKYHVDHILPQSYIKDDSLENKALVLASENENKIDNMLISHDIIATNLPRWQALKDQNLMGSKKFADLTRTTVTENQKKGFIQRQLVQTSQIVKNITLILNDLYKNTSCIETRATLSSEFRKAFSNFDETTYHYQFPEFVKNRDVNDFHHAQDAFLACVIGEYQLKKYPKDNLRLVYDQYSKFLDSLKKDTRKKNGRMPRYTQNGFIIGSMFNGKTYVDDNGEIIWDQKIKESIRKTFNYHQFNVVRQTIEQHGKLFNDTIQPHSDRYKLIPLKTNRDPAIYGGYNNDNNAYSVVLDVDGKKKINGIPIRIANQLKSDELDLSSWLENNIKHKKPMTILIDKVPKYQRIINEETGDLLITSANEVINNVQLFLPSMYTALISLLDSTKTEMYSKLLSNYEANILIDIYDYLLTKLKNNYPLYRKEWAKLAEHRDDFIESDLVTQASTLQQLIKFMHADPSNVNLKFGNFKGNRFGRKNGNIKLSKTDFIYESPTGLFKSIKHID

SEQ ID NO: 529 - protein, 1372 aa, Legionella pneumophila
MESSQILSPIGIDLGGKFTGVCLSHLEAFAELPNHANTKYSVILIDHNNFQLSQAQRRATRHRVRNKKRNQFVKRVALQLFQHILSRDLNAKEETALCHYLNNRGYTYVDTDLDEYIKDETTINLLKELLPSESEHNFIDWFLQKMQSSEFRKILVSKVEEKKDDKELKNAVKNIKNFITGFEKNSVEGHRHRKVYFENIKSDITKDNQLDSIKKKIPSVCLSNLLGHLSNLQWKNLHRYLAKNPKQFDEQTFGNEFLRMLKNFRHLKGSQESLAVRNLIQQLEQSQDYISILEKTPPEITIPPYEARTNTGMEKDQSLLLNPEKLNNLYPNWRNLIPGIIDAHPFLEKDLEHTKLRDRKRIISPSKQDEKRDSYILQRYLDLNKKIDKFKIKKQLSFLGQGKQLPANLIETQKEMETHFNSSLVSVLIQIASAYNKEREDAAQGIWFDNAFSLCELSNINPPRKQKILPLLVGAILSEDFINNKDKWAKFKNFWNTHKIGRTSLKSKCKEIEEARKNSGNAFKIDYEEALNHPEHSNNKALIKIIQTIPDIIQAIQSHLGHNDSQALIYHNPFSLSQLYTILETKRDGFHKNCVAVTCENYWRSQKTEIDPEISYASRLPADSVRPFDGVLARMMQRLAYEIAMAKWEQIKHIPDNSSLLIPIYLEQNRFEFEESFKKIKGGSSDKTLEQAIEKQNIQWEEKFQRIINASMNICPYKGASIGGQGEIDHIYPRSLSKKHFGVIFNSEANLIYCSSQGNREKKEEHYLLEHLSPLYLKHQFGTDNVSDIKNFISQNVANIKKYISFHLLTPEQQKAARHALFLDYDDEAFKTITKFLMSQQKARVNGTQKFLGKQIMEFLSTLADSKQLQLEFSIKQITAEEVHDHRELLSKQEPKLVKSRQQSFPSHAIDATLTMSIGLKEFPQFSQELDNSWFINHLMPDEVHLNPVRSKEKYNKPNISSTPLFKDSLYAERFIPVWVKGETFAIGFSEKDLFEIKPSNKEKLFTLLKTYSTKNPGESLQELQAKSKAKWLYFPINKTLALEFLHHYFHKEIVTPDDTTVCHFINSLRYYTKKESITVKILKEPMPVLSVKFESSKKNVLGSFKHTIALPATKDWERLFNHPNFLALKANPAPNPKEFNEFIRKYFLSDNNPNSDIPNNGHNIKPQKHKAVRKVFSLPVIPGNAGTMMRIRRKDNKGQPLYQLQTIDDTPSMGIQINEDRLVKQEVLMDAYKTRNLSTIDGINNSEGQAYATFDNWLTLPVSTFKPEIIKLEMKPHSKTRRYIRITQSLADFIKTIDEALMIKPSDSIDDPLNMPNEIVCKNKLFGNELKPRDGKMKIVSTGKIVTYEFESDSTPQWIQTLYVTQLKKQP

SEQ ID NO: 530 - protein, 907 aa, Leptospira inadai
MAKSIEEIRSIQNEFVVEYSILLKKIKKGEIDKKNDVYKVYQNTIKSSERLEQVLKERLGFQNVSKSYFNNPYSIAQLYNLISVDRSGFSKVCRSCQEENHWRSTLIDTDRGPQAQASKQVSDTGRPFDGQLAMLLDRIAFEIVKLKRIEIERLLSNKNSSKIEVVEIPLLIEENSFNFRYELAELKKLSKKKKDQLKKSVEEFDTKLNSKQERIKAASRELCPYTGKKISKGEIDHILPRSWTQKQFGTALNAEANLIYASREGNQSKGNREYGLNDLDEKYLNIIFGTKEVDSIQRNISDTIDRLDIERGTTRIVFDRLAPNERDCLRHALFIKSLRPKVFELLSGQLKARVNGTQLYLAKRIRSLLLKNQDFITKSLIIKVPSFSFYEPRTVDLPYMRKELAEKFPNLGKQNPQPTGSHIIDAAMVMAYAVETDSGNLSFGSKDKSEGFDSESLSRFLPSNIQFLSIKSKDKTDSKYPYKKPLFKDGVFGERFLPILIAEKGLRVGYTLENSLEVNSENPEEFFNVLKPYLLFKRKPIESNYQTLVAFAQKDKRGYIVLPVNKPKALESISQRKSDPHTSILKNILYTVSRESIPSLIFDKNTLIPEIKSNKVNWGDKLEKKFRIKIEIKLYGKKIADGFIRYPGKTEWEKLLLTEPLKGLVKNKTLTPKWFDSLENLAGLDDHFKDTSNPEAKHKRKSNHYALPVPKGPSGGFRIRRNSFDGYKVYQLYSVDGNSFHAFKIENGWTGKTLLLDIYQNSGNLHSLDYDYENTDISQTALFSKFYKIEFSKEETQKINSKGIKSLYVAPGSSSRQYIRVIFDKQTFSKFIKFQSKFWEFDLITPLPKDKAKDLIESILKIFPEDLRPKKPRNDIHIQNISHDSVQVEYIADGKTQGFGQYFINQN

SEQ ID NO: 531 - protein, 418 aa, Leptospira inadai
MILKSPIAIDLGAKNTGIVYTTYQPNALPTEIHGATIISDNLKLSQVDRRAKRHQRRNYTRMKLARRLVYLIIRYHYRIPEQDLTPEVKTSLQSLLTRRGYTFQSIETEGNELGQAPWGEIEDYFPNVQDYEKSLPIQTVLYHFFSSENLELNKLVPSKEPETKEDKNILKYIREQKEAFESEQNNGARHRLKYFEEIKEDFPRKIKLMECLQKNKIEEKKFLNLIQNISNLQIKPLRAYFNDKDMKEKEIWEPRRLHTYIARWIRSWHIDPKNSSKRLIRQKLLSQLENGKLKIIRDTSIYSPSKDIISFLEEIDPKDTIPPYEDQNNRHPPRCQNLWLDGKILDRYFPGWEQSLWKLIRNEKNNPFEQLITKDFRTDDTISEGKSLSEQIQIYERSHSNIKLDVRAVILQRFLDRS

SEQ ID NO: 532 - protein, 125 aa, Leptospira inadai
MSAYDRSANLDPWSLRLQGKAKKEIKTTESLSKTDLQKASDAYEKIKEILSESDTDQFIKLANRYYLEVADIKKGMWLPTAPERKHKEIPKSIAHEENQDISLFHKCNTKTGSKKRISQVSLEMF

SEQ ID NO: 533 - protein, 1355 aa, Leuconostoc gelidum
MTYSIGLDIGTGSVGWAVIGDDYRLKRAKGKNLIGVRLFDSATTAAERRGYRTTRRRLSRRHWRLRLLNDIFASDLAEQDENFLPRLKYSWVNPDDEQNPQLNSDVANGALFGSSETDKAFHKNYPTIYHLRHELMTDTAKHDLREVYLAIHHIVKYRGNFLNTADKINAENSFNVDLFIAALDEYNEFLETPITSIKDAQLFSDKLTDINARNKSVRVENAMSETYDDKSKIFKAILTALVGNTANFQTIFDLSDLEKDEAKNFKFKLDLEDVETKLDVVRAKLSDEQNAFLEAVLIAYDGITLKMILGDYKSISQSMIESYKSHQRDWKYIKNNVRLNEQKIEPDKNSVKFFKLDPKKLIYPSNLAYLQVISSNEDEHRKGLDYFKTAIQDADILQRIENDTFLPRQRTKRNGVLPYQLHLAELEQIIKKQSKYYPFLANIYTQDNKTENKLIGLLKFRVPYYVGPLVEAEKVTGDGKNHWLIKKELQENTPITPFNFDDVVDKDKSGEQFIKRITGTDSYLIGEPTLPENSLLYQKYNVLQELNNVRNERHQRLPIKVKQDIFEHVFKIDKNVNAKKVMAYLKLNGYGDFQIAGLSDTRTGKFNSNLSSYNYFVDLLGREKTEKIREDRLEEIIEIQTVFEDKILVAKRLSNLDFLTPQEKSKLSAKHYTGWGRLSQKLLTTQFIKTALSEAGDIIPQSHSIIDLLYYTDKNLMEILNDKTFNVRNWLTEQNKGTESGNSLYDQIDALAGPKDIKRGITQVFSIIDDIKKAMGSNPETVYLEFARETQTSRLTNSRLNRVQEIYNSPELKTEFAYLAKKLEAETKESIHDDRLYLYYLQEGRDMYTGKEIPFDQISSNYDIDHIIPQAFTKDDSLDNRVLVNRATNARKSNSPTFTNDIIDNRKSWWQSLVKRGLMSKEKFERLTDKRKTFSENQTNHFIARQLVETRQIIKNVADLIKNNYDGTQAVAIRASLTGEMRRYLDWPKNRDMNDYHHAHDALMMATVGKYVDRRGFFDNGSVSDGAGNAYNLYTKDWLVAARVGTRNDSQRVNPYGFIVGSMNSKAVRQQVNKETGEIVWGNENLDYLRHVLSYKKILVTRRLSGSSGRLYAETLFSPNPKAKLIAQKANRSVALYGGFTKAESAYTALVEFNKKGDRSYKLIKVPMAIANRVNDKQITVTAYIASLNLRDFSRVVLEHLPLGTLIRESDGSEFYAASSEYKHNAKELWAPKEILRSSKKLDKATADNLIDIFDFLTNDKTISNFKFYEKDLLHLKNVRDKFVEASDEIKIKVLSDVIYELHNDAGWRDPFKHIQEKPAWTMLQVKGGIKLSEKAAIVYQSPTGLFETITIVGE

SEQ ID NO: 534 - protein, 883 aa, Leuconostoc pseudomesenteroides
MIGVRLFEGADTAAERRGYRTTRRRLSRRRWRLRLLNDIFASELSKIDENFLPRLKYSWVNKNDTDNVHFGVGVFDNSEQEKAFYQDYPTIYHLRQKLMTDNRQHDLREVYLAIHHIVKYRGHFLNSGEISANSSFDAQKFLELLREFDNTFYPDAVKFLNLDQLDLPDKISSEISDSKISKSERVDRVLQHVQLANSGAKKILKAILNAVVGNSVDSVAMFSLSDLDKEEKKKINHPVTDSKPFKYSDKEVEAKLDELSNLLQDEQKIEFLSLLKLSFDGLTLKMLLGNAKSVSEAMVERYKVHKDDLKFIKENILNSFSKDKKKEFDKYYEAHLAEKDVDNVDKYFKKIIDDSIISKDKKIELLQKIDDHDFLPSQRSKINGAIPHQLHRNELDKIISQQSKYYPFLADSYTQNGKTETKLAGLVNFRVPYYVGPLVSKENADRNNPDGGQNHWVEFKENTSLSNLTPWNFNEIVDKDKSAAKFIERLTGMDTYLIGEPTLPQNSLLYQKYNVLQELNNIRVDNHKLDVKIKQDVFEHLFKTQNSVSAKDVKNYLIANGYAAPSIQITGLSDTNEKTFNSKLSSYNYLVDKLGRTFVESVKSDVLEKIIELQTVFEDKTVLLRQLSMISELTLAQANQLAEKHWTGWGRLSRKLLSSKVVDVNKITNSTFYPATSRQTIIDTLYHTQLNLMEIINNAEDLYGVRQWISEQNKSDSSDTNDVYDQIQELAGDKKIKRGITQSFRILDDIVKAMGGEPERVYLEFARENQQSGVSFSRKNLLSKLYENDSLKQTFKELKSQLESETKENLQNDRLYLYYLQQGRDMYSNDELNIDQLSSYDIDHIIPQAYTKDNSFDNRVLVSSKANRLKRMLLWYPVKLSKK

SEQ ID NO: 535 - protein, 468 aa, Leuconostoc pseudomesenteroides
MKDQGFISKRKFENLTRRGDFSEQQKERFIARALVETRQIIVNVSSLIDSHFNHTKAVAVKSNMTTDMRHYTKVPKNRDINDYHHAHDALFVATVGQYIENKGFMKAGKLSDSVGNEYNRYTKKWIETARKNTNYGRVNPFGFVVGSMQTATRGKLDYETGELKVVKNNYWSKDDLDYLLKVVSYKKILVTTKLQDNKGAMYDANLISAKGSGKKKAQLQISKSKNIDLYGGFNKLQNEYSVLILNHDEYRWLSIPMYARNSSEQYLHDKYPDAKVILNHILVGQPILLSNSSDPQKSKFASLRIATGGDYHNNFEFVPSVDVKKILDNIYLNHSVTDDEYKKVFESLLATLHDKFVFGIHQVMYNKIFDNKYLFDKMPDEAKRNVINSLLKFMNISKNQLGAVGKIGGKVNGVLYGFKTETEKGTSAGQLISNGKMQPHDIFIFQSPTGIFERRVTVAELANVIKDE

SEQ ID NO: 536 - protein, 1103 aa, Listeria innocua
LKLYPGEKSTGMFAQFISLIVGSKGNFQKPFDLIEKSDIECAKDSYEEDLESLLALIGDEYAELFVAAKNAYSAVVLSSIITVAETETNAKLSASMIERFDTHEEDLGELKAFIKLHLPKHYEEIFSNTEKHGYAGYIDGKTKQADFYKYMKTTLENIEGADYFIAKIEKENFLRKQRTFDNGAIPHQLHLEELEAILHQQAKYYPFLKENYDKIKSLVTFRIPYFVGPLANGQSEFAWLTRKADGEIRPWNIEEKVDFGKSAVDFIEKMTNKDTYLPKENVLPKHSLCYQKYLVYNELTKVRYINDQGKTSYFSGQEKEQIFNDLFKQKRKVKKKDLELFLRNMSHVESPTIEGLEDSFNSSYSTYHDLLKVGIKQEILDNPVNTEMLENIVKILTVFEDKRMIKEQLQQFSDVLDGVVLKKLERRHYTGWGRLSAKLLMGIRDKQSHLTILDYLMNDDGLNRNLMQLINDSNLSFKSIIEKEQVTTADKDIQSIVADLAGSPAIKKGILQSLKIVDELVSVMGYPPQTIVVEMARENQTTGKGKNNSRPRYKSLEKAIKEFGSQILKEHPTDNQELKNNRLYLYYLQNGKDMYTGQDLDIHNLSNYDIDHIVPQSFITDNSIDNLVLTSSAGNREKGNDVPPLEIVQKRKVFWEKLYQGNLMSKRKFDYLTKAERGGLTEADKARFIHRQLVETRQITKNVANILHQRFNYGKDDHGNTMKQVRIVTLKSALVSQFRKQFQLYKVRGVNDYHHAHDAYLNGVVANTLLKVYPQLEPEFVYGDYHQFDWFKANKATAKKQFYTNIMLFFAQKDRIIDENGEILWDKKYLDTVKKVMSYRQMNIVKKTEIQKGEFSKATIKPKGNSSKLIPRKTNWDPMKYGGLDSPNMAYAVVIEYAKGKNKLVFEKKIIRVTIMERKAFEKDEKAFLEEQGYRQPKVLAKLPKYTLYECEEGRRRMLASANEAQKGNQQVLPNHLVTLLHHAANCEVSDGKSLDYIESNREMFAELLAHVSEFAKRYTLAEANLNKINQLFEQNKEGDIKAIAQSFVDLMAFNAMGAPASFKFFETTIERKRYNNLKELLNSTIIYQSITGLYESRKRLDD

SEQ ID NO: 537 - protein, 1337 aa, Listeria innocua
MKNMKKPYTIGLDIGTNSVGWAVLTDQYDLVKRKMKIAGDSEKKQIKKNFWGVRLFDEGQTAADRRMARTARRRIERRRNRISYLQGIFAEEMSKTDANFFCRLSDSFYVDNEKRNSRHPFFATIEEEVEYHKNYPTIYHLREELVNSSEKADLRLVYLALAHIIKYRGNFLIEGALDTQNTSVDGIYKQFIQTYNQVFASGIEDGSLKKLEDNKDVAKILVEKVTRKEKLERILKLYPGEKSAGMFAQFISLIVGSKGNFQKPFDLIEKSDIECAKDSYEEDLESLLALIGDEYAELFVAAKNAYSAVVLSSIITVAETETNAKLSASMIERFDTHEEDLGELKAFIKLHLPKHYEEIFSNTEKHGYAGYIDGKTKQADFYKYMKMTLENIEGADYFIAKIEKENFLRKQRTFDNGAIPHQLHLEELEAILHQQAKYYPFLKENYDKIKSLVTFRIPYFVGPLANGQSEFAWLTRKADGEIRPWNIEEKVDFGKSAVDFIEKMTNKDTYLPKENVLPKHSLCYQKYLVYNELTKVRYINDQGKTSYFSGQEKEQIFNDLFKQKRKVKKKDLELFLRNMSHVESPTIEGLEDSFNSSYSTYHDLLKVGIKQEILDNPVNTEMLENIVKILTVFEDKRMIKEQLQQFSDVLDGVVLKKLERRHYTGWGRLSAKLLMGIRDKQSHLTILDYLMNDDGLNRNLMQLINDSNLSFKSIIEKEQVTTADKDIQSIVADLAGSPAIKKGILQSLKIVDELVSVMGYPPQTIVVEMARENQTTGKGKNNSRPRYKSLEKAIKEFGSQILKEHPTDNQELRNNRLYLYYLQNGKDMYTGQDLDIHNLSNYDIDHIVPQSFITDNSIDNLVLTSSAGNREKGDDVPPLEIVRKRKVFWEKLYQGNLMSKRKFDYLTKAERGGLTEADKARFIHRQLVETRQITKNVANILHQRFNYEKDDHGNTMKQVRIVTLKSALVSQFRKQFQLYKVRDVNDYHHAHDAYLNGVVANTLLKVYPQLEPEFVYGDYHQFDWFKANKATAKKQFYTNIMLFFAQKDRIIDENGEILWDKKYLDTVKKVMSYRQMNIVKKTEIQKGEFSKATIKPKGNSSKLISRKTNWDPMKYGGLDSPNMAYAVVIEYAKGKNKLVFEKKIIRVTIMERKAFEKDEKAFLEEQGYRQPKVLAKLPKYTLYECEEGRRRMLASANEAQKGNQQVLPNHLVTLLHHVANCEVSDGKSLDYIESNREMFAELLAHVSEFAKRYTLAEANLNKINQLFEQNKEGDIKAIAQSFVDLMAFNAMGAPASFKFFETTIERKRYNNLKELLNSTIIYQSITGLYESRKRLDD

SEQ ID NO: 538 - protein, 953 aa, Listeria ivanovii
MKKMLANIDGADYFIDQIEEENFLRKQRTFDNGTIPHQLHLEELEAILHQQAKYYPFLRKDYEKIRSLVTFRIPYFIGPLANGQSDFAWLTRKADGEIRPWNIEEKVDFGKSAIDFIEKMTNKDTYLPKENVLPKHSLCYQKYMVYNELTKIRYIDDQGKTHHFSGQEKQQIFNGLFKQQRKVKKKDLERFLYTINHIESPTIEGVEDAFNSSFATYHDLQKGGVTQEILDNPLNADMLEEIVKILTVFEDKRMIKEQLQSFSDVLDGTILKKLERRHYTGWGRLSAKLLTGIRDKHSHLTILDYLMNDDGLNRNLMQLINDSNLSFKSIIEKEQVSTADKGIQSIVAELAGSPAIKKGILQSLKIVDELVGIMGYPPQTIVVEMARENQTTGKGKNNSKPRFISLEKAIKEFGSQILKEHPTDNQCLKNDRLYLYYLQNGKDMYTGKELDIHNLSNYDIDHIIPQSFITDNSIDNRVLVSSTANREKGDNVPLLEVVRKRKAFWEKLYQAKLMSKRKFDYLTKAERGGLTEADKANFIQRQLVETRQITKNVANILYQRFNCKQDENGNEVEQVRIVTLKSTLVSQFRKQFQLYKVREVNDYHHAHDAYLNGVVANTLLKVYPQLEPEFVYGDYHQFDWFKANKATAKKQFYTNIMRFFAKENQIIDKNGEILWDNRYLDTIKKVLSYRQMNIVKKTEIQKGEFSNATVNPKGNSSKLISRKADWNPIKYGGFDGSNMAYSIVIEYEKRKKKTVIKKELIQINIMERVAFEKDQKAFLEEKGYYSPKVLTKIPKYTLYECENGRRRMLGSANEAQKGNQMVLPNHLMTLLYHAKNCEANDGESLAYIEMHREMFAELLAYISEFAKRYTLANDRLEKINMFFEQNKKGDIKVIAKSFDKLKVFNAFGAPRDFEFFETTIKRKRYYNIKELLNATIIYQSITGLYEARKRLED

SEQ ID NO: 539 - protein, 232 aa, Listeria ivanovii
MMSKLILGLDIGISSVGWGVLDESTNEVVDAGVRLFEEATRNGNEDRRGFRSARRLKRRRQHRLERAKGLIENNGFSCTDINKFNPYQARYNAIFGEVTKDELAAALFHLVKRRGTTIDAPEEEVKDVENELSTKMQLEKNAKKLATKYDYICEIQLEKLKENKVVRDHENRFRTEDYVKEARAILENQQEYYPEVTNEFIESYMALIETRRMYYDGPGSEKSPTPYGQYFI

SEQ ID NO: 540 - protein, 300 aa, Listeria monocytogenes
DDGLNRNLMQLINDSNLSFKSIIEKEQVSTTDKDLQSIVADLAGSPAIKKGILQSLKIVDELVSIMGYPPQTIVVEMARENQTTVKGKNNSRPRYKSLEKAIKEFGSQILKEHPTDNQELRNNRLYLYYLQNGKDMYTGQELDIHNLSNYDIDHIVPQSFITDNSIDNLVLTSSAGNREKGDDVPPLEIVRKRKVFWEKLFQGNLMSKRKFDYLTKAERGGLTEADKATFIHRQLVETRQITKNVANILHQRFNNETDNHGNNMEQVRIVMLKSALVSQFRKQFQLYKVREVNDYHHAHD

SEQ ID NO: 541 - protein, 782 aa, Listeria monocytogenes
  misc_feature (722)..(722): Xaa can be any naturally occurring amino acid
IFNDLFKQKRKVKKKDLELFLRNINQIESPTIEGLEDSFNASYATYHDLLKVGMKQEILDNPLNTEMLEDIVKILTVFEDKRMIKEQLQQFSDVLDGVVLKKLERRHYTGWGRLSAKLLVGIRDKQSHLTILEYLMNDDGLNRNLMQLINDSNLSFKSIIEKEQVSTTDKDLQSIVADLAGSPAIKKGILQSLKIVDELVSIMGYPPQTIVVEMARENQTTVKGKNNSRPRYKSLEKAIKEFGSQILKEHPTDNQELKNNRLYLYYLQNGKDIYTGQELDIHNLSNYDIDHIVPQSFITDNSIDNLVLTSSAGNREKGDDVPPLEIVRKRKVFWEKLYQGNLMSKRKFDYLTKAERGGLTEADKARFIHRQLVETRQITKNVANILHQRFNNETDNHGNTMEQVRIVTLKSALVSQFRKQFQLYKVREVNDYHHAHDAYLNGVVANTLLKVYPQLEPEFVYGEYHQFDWFKANKATAKKQFYTNIMLFFAQKERIIDENGEILWDKKYLETIKKVLDYRQMNIVKKTEIQKGEFSKATIKPKGNSSKLIPRKENWDPMKYGGLDSPNMAYAVIIEHAKGKKKIVIEKKLIQINIMERKMFEKDEEAFLEEKGYRHPKVLTKLPKYTLYECEKGRRRMLASANEAQKGNQLVLSNHLVSLLYHAKNCEASDGKSLKYTEAHRETFSELLAQVSEFATRYTLADANLSKINNLFEQNKEGDIKXIAQSFVDLMVFNAMGAPASFKFFEATIDRKRYTNLKELLSSTIIYQSITGLYESRKRLDD

SEQ ID NO: 542 - protein, 1334 aa, Listeria monocytogenes; identical to SEQ ID NO: 124

SEQ ID NO: 543 - protein, 1334 aa, Listeria monocytogenes
MKNPYTIGLDIGTNSVGWAVLTDQYDLVKRKMKVAGNSDKKQIKKNFWGVRLFDDGQTAVDRRMNRTARRRIERRRNRISYLQEIFAVEMANIDANFFCRLNDSFYVDSEKRNSRHPFFATIEEEVAYHKNYRTIYHLREELVNSSEKADLRLVYLALAHIIKYRGNFLIEGALDTKNTSVDEVYKQFIQTYNQVFMSNIEEGALAKVEENTEVASILAGKFTRREKFERILRLYPGEKSTGMFAQFISLIVGNKGNFQKVFNLVEKTDIECAKDSYEEDLEALLAIIGDEYAELFVAAKNTYNAVVLSSIITVTATETNAKLSASMIERFDAHEKELGELKAFIKLHLPKQYQEIFNNAEIDGYAGYIDGKTKQVDFYKYLKTTLENVEGADYFITKIEEENFLRKQRTFDNGVIPHQLHLEELEAILHQQAKYYPFLREGYDKIKSLVTFRIPYFVGPLANGQSEFAWLTRKDDGEIRPWNIEEKVDFGKSAVDFIEKMTNKDTYLPKENVLPKHSLCYQKYMVYNELTKIRYIDDQGKTNYFSGREKQQIFNDLFKQKRKVKKKDLELFLRNINHIESPTIEGLEDSFNASYATYHDLLKVGLKQEILDNPLNTEILEDIVKILTVFEDKRMIKEQLEQFSDVLDGVVLKKLERRHYTGWGRLSAKLLVGIRDKQSHLTILDYLMNDDGLNRNLMQLINDSNLSFKSIIEKEQVSTTDKDLQSIVADLAGSPAIKKGILQSLKIVDELVSIMGYPPQTIVVEMARENQTTGKGKNNSKPRYKSLEKAIKDFGSQILKEHPTDNQELKNNRLYLYYLQNGKDIYTGQELDIHNLSNYDIDHIVPQSFITDNSIDNLVLTSSAGNREKGGDVPPLEIVRKRKVFWEKLYQGNLMSKRKFDYLTKAERGGLTEADKARFIHRQLVETRQITKNVANILHQRFNKETDNHGNTMEQVRIVTLKSALVSQFRKQFQLYKVREVNDYHHAHDAYLNGVVANTLLKVYPQLEPEFVYGEYHQFDWFKANKATAKKQFYTNIMLFFAQKERIIDENGEILWDKKYLETIKKVLDYRQINIVKKTEIQKGEFSKATIKPKGNSSKLIPRKENWDPMKYGGLDSPNMAYAVIIEHAKGKKKIVIEKKLIQINIMERKMFEKDEEAFLEEKGYHQPKVLTKLPKYTLYECEKGRRRMLSSANEAQKGNQLVLSNHLVSLLYHAKNCEASDGKSLKYIEAHRETFSELLAQVSEFATKYTLADANLSKINNLFEQNKEGDIKAIAQSFVDLMAFNAMGAPASFKFFEATIDRKRYTNLKELLSSTIIYQSITGLYESRKRLDD

SEQ ID NO: 544 - protein, 1334 aa, Listeria monocytogenes
MKNPYTIGLDIGTNSVGWAVLTDQYDLVKRKMKVAGNSDKKQIKKNFWGVRLFDDGQTAVDRRMNRTARRRIERRRNRISYLQEIFAVEMANIDANFFCRLNDSFYVDSEKRNSRHPFFATIEEEVAYHKNYRTIYHLREELVNSSEKADLRLVYLALAHIIKYRGNFLIEGALDTKNTSVDEVYKQFIQTYNQVFMSNIEEGALAKVEENTEVASILAGKFTRREKFERILRLYPGEKSTGMFAQFISLIVGNKGNFQKVFNLVEKTDIECAKDSYEEDLEALLAIIGDEYAELFVAAKNTYNAVVLSSIITVTATETNAKLSASMIERFDAHEKELGELKAFIKLHLPKQYQEIFNNAEIDGYAGYIDGKTKQVDFYKYLKTTLENVEGADYFITKIEEENFLRKQRTFDNGVIPHQLHLEELEAILHQQAKYYPFLREGYDKIKSLVTFRIPYFVGPLANGQSEFAWLTRKDDGEIRPWNIEEKVDFGKSAVDFIEKMTNKDTYLPKENVLPKHSLCYQKYMVYNELTKIRYIDDQGKTNYFSGREKQQIFNDLFKQKRKVKKKDLELFLRNINHIESPTIEGLEDSFNASYATYHDLLKVGLKQEILDNPLNTEILEDIVKILTVFEDKRMIKEQLEQFSDVLDGVVLKKLERRHYTGWGRLSAKLLVGIRDKQSHLTILDYLMNDDGLNRNLMQLINDSNLSFKSIIEKEQVSTTDKDLQSIVADLAGSPAIKKGILQSLKIVDELVSIMGYPPQTIVVEMARENQTTGKGKNNSKPRYKSLEKAIKDFGSQILKEHPTDNQELKNNRLYLYYLQNGKDIYTGQELDIHNLSNYDIDHIVPQSFITDNSIDNLVLTSSAGNREKGGDVPPLEIVRKRKVFWEKLYQGNLMSKRKFDYLTKAERGGLTEADKARFIHRQLVETRQITKNVANILHQRFNKETDNHGNTMEQVRIVTLKSALVSQFRKQFQLYKVREVNDYHHAHDAYLNGVVANTLLKVYPQLEPEFVYGEYHQFDWFKANKATAKKQFYTNIMLFFAQKERIIDENGEILWDKKYLETIKKVLDYRQINIVKKTEIQKGEFSKATIKPKGNSSKLIPRKENWDPVKYGGLDSPNMAYAVIIEHAKGKKKIVIEKKLIQINIMERKMFEKDEEAFLEEKGYHQPKVLTKLPKYTLYECEKGRRRMLSSANEAQKGNQLVLSNHLVSLLYHAKNCEASDGKSLKYIEAHRETFSELLAQVSEFATKYTLADANLSKINNLFEQNKEGDIKAIAQSFVDLMAFNAMGAPASFKFFEATIDRKRYTNLKELLSSTIIYQSITGLYESRKRLDD

SEQ ID NO: 545 - protein, 1099 aa, Listeria monocytogenes
MKNPYTIGLDIGTNSVGWAVLTDQYDLVKRKMKVAGNSDKKQIKKNFWGVRLFDDGQTAVDRRMNRTARRRIERRRNRISYLQEIFAVEMANIDANFFCRLNDSFYVDSEKRNSRHPFFATIEEEVAYHKNYRTIYHLREELVNSSEKADLRLVYLALAHIIKYRGNFLIEGALDTKNTSVDEVYKQFIQTYNQVFMSNIEEGALAKVEENTEVASILAGKFTRREKFERILRLYPGEKSTGMFAQFISLIVGNKGNFQKVFNLVEKTDIECAKDSYEEDLEALLAIIGDEYAELFVAAKNTYNAVVLSSIITVTATETNAKLSASMIERFDAHEKELGELKAFIKLHLPKQYQEIFNNAEIDGYAGYIDGKTKQVDFYKYLKTTLENVEGADYFITKIEEENFLRKQRTFDNGVIPHQLHLEELEAILHQQAKYYPFLREGYDKIKSLVTFRIPYFVGPLANGQSEFAWLTRKDDGEIRPWNIEEKVDFGKSAVDFIEKMTNKDTYLPKENVLPKHSLCYQKYMVYNELTKIRYIDDQGKTNYFSGREKQQIFNDLFKQKRKVKKKDLELFLRNINHIESPTIEGLEDSFNASYATYHDLLKVGLKQEILDNPLNTEILEDIVKILTVFEDKRMIKEQLEQFSDVLDGVVLKKLERRHYTGWGRLSAKLLVGIRDKQSHLTILDYLMNDDGLNRNLMQLINDSNLSFKSIIEKEQVSTTDKDLQSIVADLAGSPAIKKGILQSLKIVDELVSIMGYPPQTIVVEMARENQTTGKGKNNSKPRYKSLEKAIKDFGSQILKEHPTDNQELKNNRLYLYYLQNGKDIYTGQELDIHNLSNYDIDHIVPQSFITDNSIDNLVLTSSAGNREKGGDVPPLEIVRKRKVFWEKLYQGNLMSKRKFDYLTKAERGGLTEADKARFIHRQLVETRQITKNVANILHQRFNKETDNHGNTMEQVRIVTLKSALVSQFRKQFQLYKVREVNDYHHAHDAYLNGVVANTLLKVYPQLEPEFVYGEYHQFDWFKANKATAKKQFYTNIMLFFAQKERIIDENGEILWDKKYLETIKKVLDYRQINIVKKTEIQKGEFSKATIKPKGIPAN

SEQ ID NO: 546 - protein, 1334 aa, Listeria monocytogenes
MKNPYTIGLDIGTNSVGWAVLTDQYDLVKRKMKVAGNSDKKQIKKNFWGVRLFDEGETAADRRMNRTARRRIERRRNRISYLQEIFALEMANIDANFFCRLNDSFYVDSEKRNSRHPFFATIEEEVAYHKNYRTIYHLREELVNSSEKADLRLVYLALAHIIKYRGNFLIEGALDTKNTSVDGVYKQFIQTYNQVFISNIEEGTLAKMEENTTVADILAGKFTRKEKLERILQLYPGEKSTGMFAQFISLIVGSKGNFQKVFDLVEKTDIECAKDSYEEDLEALLAIIGDEYAELFVAAKNTYNAVVLSSIITVTDTETNAKLSASMIERFDAHEKDLSELKAFIKLHLPKQYEEIFSNVAIDGYAGYIDGKTKQVDFYKYLKTLLENIEGADYFIAKIEEENFLRKQRTFDNGAIPHQLHLEELEAILHQQAKYYPFLKEAYDKIKSLVTFRIPYFVGPLANGQSDFAWLTRKADGEIRPWNIEEKVDFGKSAVDFIEKMTNKDTYLPKENVLPKHSLYYQKYMVYNELTKVRYIDDQGKTNYFSGQEKQQIFNDYFKQKRKVSKKDLEQFLRNMSHIESPTIEGLEDSFNSSYATYHDLLKVGIKQEVLENPLNTEMLEDIVKILTVFEDKRMIKEQLQQFSDVLDGAVLKKLERRHYTGWGRLSAKLLVGIRDKQSHLTILDYLMNDDGLNRNLMQLINDSNLSFKSIIEKEQVSTTDKDLQSIVADLAGSPAIKKGILQSLKIVDELVSIMGYPPQTIVVEMARENQTTVKGKNNSRPRYKSLEKAIKEFGSQILKEHPTDNQELRNNRLYLYYLQNGKDMYTGQELDIHNLSNYDIDHIVPQSFITDNSIDNLVLTSSAGNREKGDDVPPLEIVRKRKVFWEKLFQGNLMSKRKFDYLTKAERGGLTEADKATFIHRQLVETRQITKNVANILHQRFNNETDNHGNNMEQVRIVMLKSALVSQFRKQFQLYKVREVNDYHHAHDAYLNGVVANTLLKVYPQLEPEFVYGEYHQFDWFKANKATAKKQFYTNIMLFFAQKERIIDENGEILWDKKYLETIKKVLDYRQMNIVKKTEIQKGEFSKATIKPKGNSSKLIPRKENWDPMKYGGLDSPNMAYAVIIEHAKGKKKVVFEKKIIRITIMERKAFEKDEKSFLEKQGYRQPKVLTKLPKYTLYECENGRRRMLASANEAQKGNQQVLKGQLITLLHHAKNCEASDGKSLDYIESNREMFGELLAHVSEFAKRYTLADANLSKINQLFEQNKDNDIKVIAQSFVNLMAFNAMGAPASFKFFEATIERKRYTNLKELLSATIIYQSITGLYEARKRLDG

SEQ ID NO: 547 - protein, 1334 aa, Listeria monocytogenes
MKNPYTIGLDIGTNSVGWAVLTNQYDLVKRKMKVAGNSDKKQIKKNFWGVRLFDDGQTAVDRRMNRTARRRIERRRNRISYLQEIFAVEMANIDANFFCRLNDSFYVDSEKRNSRHPFFATIEEEVAYHKNYRTIYHLREELVNSSEKADLRLVYLALAHIIKYRGNFLIEGALDTKNTSVDGVYEQFIQTYNQVFMSNIEEGTLAKVEENIEVANILAGKFTRREKFERILQLYPGEKSTGMFAQFISLIVGSKGNFQKVFDLIEKTDIECAKDSYEEDLEALLAIIGDEYAELFVAAKNTYNAVVLSSIITVTATETNAKLSASMIERFDAHEKDLGELKAFIKLHLPKQYQEIFNNAAIDGYAGYIDGKTKQVDFYKYLKTILENIEGADYFIAKIEEENFLRKQRTFDNGAIPHQLHLEELEAIIHQQAKYYPFLREDYEKIKSLVTFRIPYFVGPLAKGQSEFAWLTRKADGEIRPWNIEEKVDFGKSAVDFIEKMTNKDTYLPKENVLPKHSLCYQKYMVYNELTKVRYIDDQGKTNYFSGQEKQQIFNDLFKQKRKVKKKDLELFLRNINHIESPTIEGLEDSFNASYATYHDLLKVGMKQEILDNPLNTEMLEDIVKILTVFEDKPMIKEQLQQFSDVLDGGVLKKLERRHYTGWGRLSAKLLVGIREKQSHLTILDYLMNDDGLNRNLMQLINDSNLSFKSIIEKEQVSTTDKDLQSIVADLAGSPAIKKGILQSLKIVDELVSIMGYPPQTIVVEMARENQTTGKGKNNSKPRYKSLEKAIKEFGSKILKEHPTDNQELKNNRLYLYYLQNGKDMYTGQELDIHNLSNYDIDHIVPQSFITDNSIDNLVLTSSAGNREKGGDVPPLEIVRKRKVFWEKLYQGNLMSKRKFDYLTKAERGGLTDADKARFIHRQLVETRQITKNVANILHQRFNNETDNHGNTMEQVRIVTLKSALVSQFRKQFQLYKVREVNDYHHAHDAYLNGVVANTLLKVYPQLEPEFVYGEYHQFDWFKANKATAKKQFYTNIMLFFGQKERIIDENGEILWDKKYLETIKKVLDYRQMNIVKKTEIQKGEFSKATIKPKGNSSKLIPRKENWDPMKYGGLDSPNMAYAVIIEHAKGKKKLIFEKKIIRITIMERKMFEKDEEAFLEEKGYRHPKVLTKLPKYTLYECEKGRRRMLASANEAQKGNQLVLSNHLVSLLYHAKNCEASDGKSLKYIEAHRETFSELLAQVSEFATRYTLADANLSKINNLFEQNKEGDIQAIAQSFVDLMAFNAMGAPASFKFFEATIDRKRYTNLKELLSSTIIYQSITGLYESRKRLDD

SEQ ID NO: 548 - protein, 874 aa, Listeria seeligeri; identical to SEQ ID NO: 190

SEQ ID NO: 549 - protein, 1087 aa, Listeriaceae bacterium
MKKLVLGLDIGVASVGWGIIDAENGDVVDTGVRLFSSRDASENESRRTSRQSRRLSRRKKHRRERIKQLLLAHDMDICDIVNENPYELRVKGLNEKLEVSEIYVALTHLAKRRGVSYLDDVVEEGGTIKSEHLNKNMEEIKSGKMPCEIQLERFEKYGQVRGMIEINQDTEESSFLVNIFRTSDYIKEAKTILATQQKFHKQITNEFIDEYIHIMASKRDYFIGPGNEKSRTDYGVYRTNGDTWDNLFEILIGKCSVFPEETRAARSSYVAQEFNLLNDLNNLKISNLESGKLSASQKHDIVEKVKNSKKFGTKDLLKYIASVCECKIEDIGGCRVDKNRKPIMHTFENYRKVHNALNEAGVDLRLSETDYDELMKIMTLNSETLEIKKQCKEKLPQLTEDYLNVCLVLNKKGAFSGWHALSLKAMKLMMPELYGTSKNQMQIIHTMQLGKAYLKPLNQQKYLNSEAILEEIYNPIAARSIRQTIKVTNAILKKYGHLDSVIIEMPRDYQTSEDERKMIEKMQKENEKEKKAALKRAREEYPFPDEAFRNHKELATKLRLWYQQDQFCVYSGRKISVVDLVRNPNQFEIDHIIPQSVSLDDSLNNKVLCFSEENQKKGQQTPFYYHKGKSGNWTYEQYKLFVEKLFDKKKISNKKRELLLFEEDINKWDVRRGFIARNLVDTRYASRVILNSYQQYFGNHEMGTKVKVVRGKFTSQLRKKWRIFKDRNESHSHHAIDALIVAATANLRLWKKNTLGVSDEGKVYDKETGEILPFEKLTESEYNEMMNKEPYLNFKTKLQNIETKVKYSYRVSKKVNRKISDATIYSTRERDGIDYIVGKIKNIYDVKTYKDQFLKRYKKNKEQFLMYQHDPQTFAILENIMATYQDAENPFLAYKKEYGVIRKYSKKGGGSPVTSLKFIDKVLGQKIDLTAKNQAALPKNKKVVLQSITPYRADVYYDEIDKRYHLIGVKYSLFSFSKQGYVINPIAYQKLLEKEQIHSEMKFCFSLYREDIIEFGEDPDSLTRYRFWSKNESGKNKIEVKPIEKPNFEKQTVLTITKKIKILNKYQTDVLGNSFKAQEEKDPRNIE

SEQ ID NO: 550 - protein, 1345 aa, Marinilabilia sp.
MKKILGLDLGTTSIGWAFIKEPEKDVVGSEIVDMGVRIVALSSDEENDFAKGNTISINADRTLKRGARRNLQRFKLRRDALLEIFKEMKLIPSNFKYAEDGPSSTFSTLKLRDKAAKEKIELDDLVKVLLQINKKRGYRSSRKAKSEEDDGSAIDSMGIAKELYENDLTPGQWVFEALQKGRKNVPDFYRSDLQEEFKKIVNYQSEFYPDVLNSSFVEDWMGKASTPTKQYFNKKGVHLAENKGKREERRLQEYNWRAVAVNSKIDLSEIALILSQINSQISNSSGYLGAISDRSKELYFKNQTVGQYLYQQIKINPHTRLKGQVFYRQDYLDEFEKIWSVQSGFHPQLNDALKKEIRDITIFFQRRLKSQKHLISNCEFEDYHKVVPKSHPIFQEFRIWQNLNNLTLIKKDNLNEKSELALEDKIALANELAFKREQSVKDALNILGLKSSEWEFNFTKIEGNRTNHAFFEAFAKIIEIEDGEPLDLGNLKADDILDQFSEAFLRIGIDPGLLQVNNDIEGPNYEKQPYIQFWHLLYSSEDDQKLKQNLIKKFGFKPDHAKILASISLQDDHASLSSRAIKKILPHLQSGLIYDKACTYAGYNHSSSFTKEENEKRELSSELDLLKKNSLRNPVVEKILNQMINVVNAILKDPNLGKPDEIRVEMARELKANAEQRKNMTSNIASATRDHEKYREILKKEFGLKRVTKNDLLRYKLWLETDGISLYTGKPIEASKLFSKEYDIEHIIPKTRLFDDSFSNKTICERQLNIDKANVTAFSFLQNKLSGDEFEQYQSRVKSLFGKLSKAKIQKLLMANDKIPEDFIARQLQETRYISKKAKEILFEITRRVSVTTGTITDKLREDWGLVEIMKELNWEKYDKLGLTYTIEGKHGERLNKIKDWSKRNDHRHHAMDALTVALTKPAYIQYLNNLNAKELNGKKSTEIFAIEQKYLKRENGKLCFIPPVENIRTEAKKHLSKVLISYKAKNKVVTINKNRTNKKAGFNEQIALTPRGQLHKETVYGKAFHYSTKFEKIGASFDVQKINAVAKKEEREALLKRLAENGDDPKKAFTGKNSLSKMPIYLDLKRNIKLPEKVKTVVLEQNYTIRKNIDPDLKLDKVIDVGVKRILENRLKEFGGNAKLALSNLDENPIWLNKEKGITIKRVKISGVSNVESLHVKKDHFGEPILDQVGNEIPVDFVSTGNNHHVAIYEDEKGNLQEEVVSFFEAVVRQNQGLPIINKNHSLGWKFLFTLKQNEYFVFPSDDFDPTDVDLMDEENYHLISPNLFRVQKFTTKDYFFRHHLETTVEDKSELKGVSFKRLGLPGLNCIKKIRINHLGKIIQVGEY

SEQ ID NO: 551 - protein, 1091 aa, Mobiluncus mulieris
MDSRKYRVGIDVGTNSVGFAAVEEDDSGSPTRFLNTMVVIHDSGVDSEQKKYAITRLASAGTARRTRRLYRTRRQRLRELDDFISNELGYPLVNLENFADPYEPWKVRADLATTKLPNDELPEAMSIALRHMARHRGWRSPYQRVEALHLHAEISKEFAALKERVVEKTGDVFSDDATPAEVLVDLMGRQKVRGADGVLSGKLRQSDNANELRKIASVQGIDDETLNRIIDRVFSSKSPKGKASERVGMDALPGQGSKPRALKAMPSFQKFRVVSVICNLRIKDSGGDARPLSMEEKEKLIDYLMSSTTDDHVTWTDVADLLHVKRSQLQGTAKEGFDGERPYTRPPVNSTWSKIKDSKIKSLVALWKTGDVDVQSAIVEALSNASVLEDSRPGADIVVAYLESLDDKELESLDKVGLPAGRASYSEDSLERLTERMLRDDCDLFEARKREFNVADDWKPPADPIYAPVGNPGVDRVLKIVNRLLMAAEREWGAPTQINIEHVRSGFSSELMQREFERENERRRAQNEEAVKAILTEKGGNSRVSKYDITRYYAVKRQHCQCLYCGTPITFSDCELDHIVPRKGVGSTNTRVNLAAACRSCNRDKSNLPFAVWAGKASNFDVSIDDAVSRVKQWQRSQNEGVREFRAFQNEVISRLLKTTEDPEIDSRSLESVAWMARELHHRVEYYFQSKGAQTQVSVYRGAVTAQARKSSGLEDKVKMIGGGGKTRLDRRHHAMDAATIALMTPGISTTLSEKNNLRDAQKFTGQSETWKDYCGRTETARKHFAVWKSNMERLTDLFNDKLENDAIPVVQPLRLRLSNSKAHDDGIGKLDSKKLGSVWSLADIDRAATPQIWTALTRCDDFDPTKGLPENANRVIRAQGVKYESEDNIPVFPSNVAAIAVRDGYAEIGSTIHHARIYRIDDGKKTFYSMIRVFAVDLLKHQAEDLFTVKLPPSAISIRTCEDSLRRALSNGTAEYLGWLVPGDEIIVDTSDKAFHTGQIGDLLRNFPVNSFRLTGFPSNSRLRLKPVLLAGEGLRDDAEDSIKKILLGQGWRPAINVLFSKGKPRIVRRNSLGIERPSSNNGLPFSWEA

SEQ ID NO: 552 - protein, 1233 aa, Mycoplasma canis
MEKKRKVTLGFDLGIASIGWAIVDSETNQVYKLGSRLFDAPDTNLERRTQRGTRRLLRRRKYRNQKFYNLVKRTEVFGLSSREAIENRFRELSIKYPNIIELKTKALSQEVCPDEIAWILHDYLKNRGYFYDEKETKEDFDQQTVESMPSYKLNEFYKKYGYFKGALSQPTESEMKDNKDLKEAFFFDFSNKEWLKEINYFFNVQKNILSETFIEEFKKIFSFTRDISKGPGSDNMPSPYGIFGEFGDNGQGGRYEHIWDKNIGKCSIFTNEQRAPKYLPSALIFNFLNELANIRLYSTDKKNIQPLWKLSSIDKLNILLNLFNLPISEKKKKLTNANINDIVKKESTKSIMLSVEDIDMIKDEWAGKEPNVYGVGLSGLNIEESAKENKFKFQDLKILNVLINLLDNVGIKFEFKDRNDIIKNLELLDNLYLFLIYQKESNNKDSSIDLFIAKNELLNIENLKLKLKEFLLGAGNEFENHNSKTHSLSKKAIDAILPKLLDNNEGWNLEAIKNYDEEIKSQIEDNSSLMAKQDKKYLNDNFLKDAILPPNVKVTFQQAILIFNKIIQKFSKDFEIDKVVIELAREMTQDQENDALKGIAKAQKSKKSLVEERLEANNIDKSVFNDKYEKLIYKIFLWISQDFKDPYTGAQISTNEIVNNKVEIDHIIPYSLCFDDSSANKVLVHKQSNQEKSNSLPYEYIKQGHSGWNWDEFTKYVKRVFVNNVDSILSKKERLKKSENLLTTSYDGYDKLGFLARNLNDTRYATILFRDQLNNYAEHHLIDNKKMFKVIAMNGAVTSFIRKNMSYDNKLRLKDRSDFSHHAYDAAIIALFSNKTKTLYNLIDPSLNGIISKRSEGYWVIEDRYTGEIKELKKEDWTSIKNNVQARKIAKEIEEYLIDLDDEVFFSRKTKRKTNRQLYNETIYGIAAKTDEDGITNYYKKEKFSILDDKDIYLRLLREREKFVINQSNPEVIDQIIEIIESYGKENNIPSRDEAINIKYTKNKINYNLYLKQYMRSLTKSLDQFSEEFINQMIANKTFVLYNPTKNTTRKIKFLRLVNDVKINDIRKNQVINKFNGKNNEPKAFYENINSLGAIVFKNSANNFKTLSINTQIAIFGDKNWDIEDFKTYNMEKIEKYKEIYGIDKTYNFHSFIFPGTILLDKQNKEFYYISSIQTVRDIIEIKFLNKIEFKDENKNPDTSKTPKRLMFGIKSIMNNYEQVDISPFGINKKIFE

SEQ ID NO: 553 - protein, 1233 aa, Mycoplasma canis
MEKKRKVTLGFDLGIASVGWAIVDSETNQVYKLGSRLFDAPDTNLERRTQRGTRRLLRRRKYRNQKFYNLVKRTEVFGLSSREAIENRFRELSIKYPNIIELKTKALSQEVCPDEIAWILHDYLKNRGYFYDEKETKEDFDQQTIESMPSYKLNEFYKKYGYFKGALSQPTESEMKDNKDLKEAFFFDFSNKEWLKEINYFFNVQKNILSETFIEEFKKIFSFTRDISKGPGSDNMPSPYGIFGEFGDNGQGGRYEHIWDKNIGKCSIFTNEQRAPKYLPSALIFNFLNELANIRLYSTDKKNIQPLWKLSSIDKLNILLNLFNLPISEKKKKLTSANINDIVKKESTKSIMLSVEDIDMIKDEWAGKEPNVYGVGLSGLNIEESAKENKFKFQDLKILNVLINLLDNVGIKFEFKDRNDIIKNLELLDNLYLFLIYQKESNNKDSSIDLFIAKNESLNIENLKLKLKEFLLGAGNEFENHNSKTHSLSKKAIDAILPKLLDNNEGWNLEAIKNYDEEIKSQIEDNSFLMAKQDKKYLNDNFLKDAILPPNVKVTFQQAILIFNKIIQKFSKDFEIDKVVIELAREMTQDQENDALKGIAKAQKSKKSLVEERLEANNIDKSVFNEKYEKLIYKIFLWISQDFKDPYTGAKISANEIVDNKVEIDHIIPYSLCFDDSSANKVLVHKQSNQEKSNSLPYEYIKQGHSGWNWDEFTKYVKRVFVNNVDSILSKKERLKKSENLLTTSYDGYDKLGFLARNLNDTRYATILFRDQLNNYAEHHLIDDKKMFKVIAMNGAVTSFIRKNMSYDNKLRLKNRNDFSHHAYDAAIIALFSNKTKTLYNLIDPSLNGIISKRSEGYWVIEDRYTGEIKELKKEDWTSIKNNVQARKIAKEIEEYLIDLDDEVFFSRKTKRKTNRQLYNETIYGIAAKTDEDGITNYYKKEKLSILDDKDIYLRLLREREKFVINQSNPEVIDQIIEIIESYGKENNIPSRDEAINIKYTKNKINYNLYLKQYMRSLTKSLDQFSEEFINQMIANKTFVLYNPTKNTTRKIKFLRLVNDVKINDIRKNQVINKFNGKNNEPKAFYENINSLGAIVFKNSANNFKTLSINTQIAIFGDKNWDIEDFKTYNMEKIEKYKEIYGIDKTYNFHSFIFPGTILLDKQNKEFYYISSIQTVRDIIEIKFLNKIEFKDENKNQDTSKTPKRLMFGIKSIMNNYEQVDISPFGINKKIFE

SEQ ID NO: 554 - protein, 1233 aa, Mycoplasma canis; identical to SEQ ID NO: 257

SEQ ID NO: 555 - protein, 1233 aa, Mycoplasma canis
MEKKRKVTLGFDLGIASVGWAIVDSETNQVYKLGSRLFDAPDTNLERRTQRGTRRLLRRRKYRNQKFYNLVKRTEVFGLSSREAIENRFRELSIKYPNIIELKTKALSQEVCPDEIAWILHDYLKNRGYFYDEKETKEDFDQQTVESMPSYKLNEFYKKYGYFKGALSQPTESEMKDNKDLKEAFFFDFSNKEWLKEINYFFNVQKNILSETFIEEFKKIFSFTRDISKGPGSDNMPSPYGIFGEFGDNGQGGRYEHIWDKNIGKCSIFTNEQRAPKYLPSALIFNFLNELANIRLYSTDKKNIQPLWKLSSVDKLNILLNLFNLPISEKKKKLTSTNINDIVKKESIKSIMISVEDIDMIKDEWAGKEPNVYGVGLSGLNIEENAKENKFKFQDLKILNVLINLLDNVGIKFEFKDRNDIIKNLELLDNLYLFLIYQKESNNKDSSIDLFIAKNKSLNIENLKLKLKEFLLGAGNEFENHNSKSHSLSKKAIDAILPKLLDNNEGWNLEAIKNYDEEIKSQIEDNSSLMAKQDKKYLNDNFLKDAILPPNVKVTFQQAILIFNKIIQKFSKDFEIDKVVIELAREMTQDQENDALKGMAKAQKSKKSLVEERLEANNIDKSVFNDKYEKLIYKIFLWISQDFKDPYTGAQISVNEIVNNKVEIDHIIPYSLCFDDSSANKVLVHKQSNQEKSNSLPYEYIKQGHSGWNWDEFTKYVKRVFVNNVDSILSKKERLKKSENLLTTSYDGYDKLGFLARNLNDTRYATILFRDQLNNYAEHHLIDNKKMFKVIAMNGAVTSFIRKNMSYDNKLRLKDRSDFSHHAYDAAIIALFSNKTKTLYNLIDPSLNGIISKRSEGYWVIEDRYTGEIKELKKEDWTSIKNNVQARKIAKEIEEYLIDLDDEVFFSRKTKRKTNRQLYNETIYGIAAKTDEDGITNYYKKEKFSILDDKDIYLRLLREREKFVINQSNPEVIDQIIEIIESYGKENNIPSRDEAINIKYTKNKINYNLYLKQYMRSLTKSLDKFSEEFINQMIANKTFVLYNPTKNTTRKIKFLRLVNDVKINDIRKNQVINKFNGKNNEPKAFYENINSLGAIVFKNSANNFKTLSINTQIAIFGDKNWDIEDFKTYNMEKIEKYKEIYGIDKTYNFHSFIFPGTILLDKQNKEFYYISSIQTVRDIIEIKFLNKIEFKDENKNQDTSKTPKRLMFGIKSIMNNYEQVDISPFGINKKIFE

SEQ ID NO: 556 - protein, 1233 aa, Mycoplasma canis
MEKKRKVTLGFDLGIASVGWAIVDSETNQVYKLGSRLFDAPDTNLERRTQRGTRRLLRRRKYRNQKFYNLVKRTEVFGLSSREAIENRFRELSIKYPNIIELKTKALSQEVCPDEIAWILHDYLKNRGYFYDEKETKEDFDQQTVESMPSYKLNEFYKKYGYFKGALSQPTESEMKDNKDLKEAFFFDFSNKEWLKEINYFFNVQKNILSETFIEEFKKIFSFTRDISKGPGSDNMPSPYGIFGEFGDNGQGGRYEHIWDKNIGKCSIFTNEQRAPKYLPSALIFNFLNELANIRLYSTDKKNIQPLWKLSSVDKLNILLNLFNLPISEKKKKLTSTNINDIVKKESIKSIMLSVEDIDMIKYEWAGKEPNVYGVGLSGLNIEESAKENKFKFQDLKILNVLINLLDNVGIKFEFKDRNDIIKNLELLDNLYLFLIYQKESNNKDSSIDLFIAKNKSLNIENLKLKLKEFLLGAGNEFENHNSKTHSLSKKAIDAILPKLLDNNEGWNLEAIKNYDEEIKSQIEDNSSLMAKQDKKYLNDNFLKDAILPPNVKVTFQQAILIFNKIIQKFSKDFEIDKVVIELAREMTQDQENDALKGIAKAQKSKKSLVEERLEANNIDKSVFDDKYEKLIYKIFLWISQDFKDPYTGAKISANEIVNNKVEIDHIIPYSLCFDDSSANKVLVHKQSNQEKSNSLPYEYIKQGHSGWNWDEFTKYVKRVFVNNVDSILSKKERLKKSENLLTTSYDGYDKLGFLARNLNDTRYATILFRDQLNNYAEHHLIDNKKMFKVIAMNGAVTSFIRKNMSYDNKLRLKDRSDFSHHAYDAAIIALFSNKTKTLYNLIDPSLNGIISKRSEGYWVIEDRYTGEIKELKKEDWTSIKNNVQARKIAKEIEEYLIDLDDEVFFSRKTKRKTNRQLYNETIYGIAAKTDEDGITNYYKKEKFSILDDKDIYLRLLREREKFVINQSNPEVIDQIIEIIESYGKENNIPSRDEAINIKYTKNKINYNLYLKQYMRSLTKSLDQFSEEFINQMIANKTFVLYNPTKNTTRKIKFLRLVNDVKINDIRKNQVINKFNGKNNEPKAFYENINSLGAIVFKNSANNFKTLSINTQIAIFGDKNWDIEDFKTYNMEKIEKYKEIYGIDKTYNFHSFIFPGTILLDKQNKEFYYISSIQTVRDIIEIKFLNKIEFKDENKNQDTSKTPKRLMFGIKSIMNNYEQVDISPFGINKKIFE

SEQ ID NO: 557 - protein, 1239 aa, Mycoplasma cynos
MEEKRKVTLGFDLGVASVGWAIVDSETNEVYKLGSRLFDIPDTNIDRRAKRGSRRLVRRRSYRNQKFYNLIKRTKTFGFLDKEAIEKEFVLLSIKYPNIIELKVKGLQEEVSKSEAVWILHDYLKNRGYFYDDKEEKDDLENPSIESMPSYKLYEFYKEYGYFKGALSSPTESEKNKDSDLEKAIFFNFSNKEWTKEINHFFKIQKNIFSEDFKAKFMEFFSFIRDISKGPGSENMPSQYSIFGKYGDDGMGGKYQHIWDKNIGKCSIFKDKVRAPKYLPSALFFNLLNELSNIRLYSVDKREKSVLWRLSSKDKINIILNILQIILFKNDGKISNLDINKIVKNESIKSIILNEIDLDLIKDMWFEKEPNVYGIGLSGLNIEENKKENRFKFQDLKIFSVFIDLLKKSNINIEFNNEKDIIHNLKLLDELYFFLITQKYSRDKYGSIKKFILNNKSFNIDNLDEKLNIFLSISDDEFDNHNSKTHSLSKEAIYFIFPKLLHNNEGWNLEAIKNYDIDVREEISKHSFGIKKQDKKYLDDAFLDDAILPPSVKVTIKQSILIFNKIIKKFSNKFQIDNVVIELAREMTQEKEMDAQKSLNRLKKSRKKIIEERLNANNIDSKMFRDKTGEISPNYIYKIYLWISQNFKDPYTGENISANDILKNNVEIDHIIPYSLCFDDSSSNKVLVFKHSNQSKGNFLPFDMISTFSENSVWNWKEYTQYVEKTFKTNLESILDKKERVKKADNLLTSSYDGYDKLGFLARNLNDTRYATILFRDQLINYSENHLIDSKKMFKVIAMNGGVTSFIRKNMSFDSGLKVKDRSIFSHHAYDAAIIALFSNKTKILYNLINPSLDGIISKRSEGYWVLEDRLTGEIRKLNYNDWQSIKNNVEVKKIAREIESHLSNLDNVVMFSRKSKRKTNKELYNETLYGIATRIDENGIKNYYKKEKFNILEDENIYLRLLNERENFIINRSNPEVIDAIIEIFETIDKNKIPARDVAKNIKYTDNKIKYNLYLKDYMRKLVDEFPDKFRKDFIEQMIAKKIFILFNPIKNTTRKIKSLRSINNNKIEDIRKKQVLEKFNTAKNEPRSFYESLNSLGAIIFKNNLNIYKKMSISSQIATFGDKNWKIDDINTYNKEKLNKYKEIYGIDETYDFYSFIFPGTILLDEKNKEFLYISSIQTLKDKIELKFLDRIEFEKKNVNSNLKPKIKREIISTKKLMSDYKIIKISPLGINKKIFE

SEQ ID NO: 558 - protein, 1269 aa, Mycoplasma gallisepticum
MNNSIKSKPEVTIGLDLGVGSVGWAIVDNETNIIHHLGSRLFSQAKTAEDRRSFRGARRLIRRRKYKLKRFINLIWKYNSYFGFKNKEDILNNYQEQQKLHNTVLNLKLEALNAKIDPKALSWILHDYLKNRGHFYEDNRDFNVYPTEELANYFGEYGYYKGIIDSKEDNDDKLEEGLTKYKFSNQHWLEEIKKVLSNQTGLPEKFKEEYESLFSYVRNYSEGPGSINSVSPYGIYHLDEKEGKVVQKYNNIWDKTIGKCSIFPDEYRAPKNSPIAMIFNEINELSTIRSYSIYLTGWFINQEFKKAYLNKLLDLLIKTNSEKPIDARQFKKLREETIAESIGKETLKDVEREEKLEKEDHKWKLKGLKLNTNGKIQYNDLSSLAKFVHKLKQHLKLDFLLEDQYTTLDKINFLQSLFVYLGKHLRYSNRVDSANLKEFSDSNKLFERVLQEQKDDLFKLFEQTDKDDEKILAQTHSLSTKAMLLAITRMTNLDNDEDNQKNNDKGWNFEAIKNFDQKFIDITKKNNNLSLKQDKRYLDDRFINDAILSPGVKRILREATKVFNAILKQFSEEYDVTKVVIELARELSEEKELENTKNYEKLIKKNSDKISERLEALDIAEDKIEDILKSPTKSYKVLLWLQQDHIDPYSQKEIAFEDILTKTEKTEIDHIIPYSISFDDSSSNKLLVLAESNQAKSNQTPYEFITSGNAGIKWEDYEAYCRKFKDGDTSLLDSTQRSKKFAKMMKTDTSSKYDIGFLARNLNDTRYATIVFRDALKDYANNHLVEDKPMFKVVCINGGVTSFLRKNFDKSWYAKKDRDKNIHHAVDASIISIFSNETKTLFNQLTQFADYKLFKNTDGSWKKIDPKTGVVTEVTDENWKQIRVRNQVSEIAKVINKCIQDSNIERKARYSRKIENKTNISLFNDTVYSAKKVGYEDQIKRKNLKTLDIHESAEENKNSKVKKQFVYRKLVNVSLLNNDKLADLFAEKEDILMYRANPWVINLAEQIFNEYTENKKIKSQNVFEKYMLDLTKEFPEKFSEAFVKSMLRNKTAIIYNVEKKVVHRIKRLKILSSELKENKLSNVIIRSKNESGTKLSYQDTINSIALMIMRSIDPTAKKQYIRVPLNTLNLHLGDQDFDLHNIDAYLKKPKFVKYLKANEIGDEYKPWRVLTSGTLLIHKKDKKLMYISSFQNLKDVIEIKNLIETEYKENDDSDPKKKKKANRFLMTLSTILNDYILLDAKDNFDILGLSKNRIDEILNSKLGLDKITK

SEQ ID NO: 559 - protein, 1224 aa, Mycoplasma gallisepticum
MNNSIKSKPEVTIGLDLGVGSVGWAIVDNETNIIHHLGSRLFSQAKTAEDRRSFRGARRLIRRRKYKLKRFINLIWKYNSYFGFKNKEDILNNYQEQQKLHNTVLNLKLEALNAKIDPKALSWILHDYLKNRGHFYEDNRDFNVYPTEELANYFGEYGYYKGIIDSKEDNDDKLEEGLTKYKFSNQHWLEEIKKVLSNQTGLPEKFKEEYESLFSYVRNYSEGPGSINSVSPYGIYHLDEKEGKVVQKYNNIWDKTIGKCSIFPDEYRAPKNSPIAMIFNEINELSTIRSYSIYLTGWFINQEFKKAYLNKLLDLLIKTNSEKPIDARQFKKLREETIAESIGKETLKDVEREEKLEKEDHKWKLKGLKLNTNGKIQYNDLSSLAKFVHKLKQHLKLDFLLEDQYTTLDKINFLQSLFVYLGKHLRYSNRVDSANLKEFSDSNKLFERVLQEQKDDLFKLFEQTDKDDEKILAQTHSLSTKAMLLAITRMTNLDNDEDNQKNNDKGWNFEAIKNFDQKFIDITKKNNNLSLKQDKRYLDDRFINDAILSPGVKRILREATKVFNAILKQFSEEYDVTKVVIELARELSEEKELENTKNYEKLIKKNSDKISERLEALDIAEDKIEDILKSPTKSYKVLLWLQQDHIDPYSQKEIAFEDILTKTEKTEIDHIIPYSISFDDSSSNKLLVLAESNQAKSNQTPYEFITSGNAGIKWEDYEAYCRKFKDGDTSLLDSTQRSKKFAKMMKTDTSSKYDIGFLARNLNDTRYATIVFRDALKDYANNHLVEDKPMFKVVCINGGVTSFLRKNFDKSWYAKKDRDKNIHHAVDASIISIFSNETKTLFNQLTQFADYKLFKNTDGSWKKIDPKTGVVTEVTDENWKQIRVRNQVSEIAKVINKCIQDSNIERKARYSRKIENKTNISLFNDTVYSAKKVGYEDQIKRKNLKTLDIHESAEENKNSKVKKQFVYRKLVNVSLLNNDKLADLFAEKEDILMYRANPWVINLAEQIFNEYTENKKIKSQNVFEKYMLDLTKEFPEKFSEAFVKSMLRNKTAIIYNVEKKVVHRIKRLKILSSELKENKLSNVIIRSKNESGTKLSYQDTINSIALMIMRSIDPTAKKQYIRVPLNTLNLHLGDQDFDLHNIDAYLKKPKFVKYLKANEIGDEYKPWRVLTSGTLLIHKKDKKLMYISSFQNLKDVIEIKNLIETEYKENDDSDPKKRRKQIGS

SEQ ID NO: 560 - protein, 1269 aa, Mycoplasma gallisepticum; identical to SEQ ID NO: 148

SEQ ID NO: 561 - protein, 226 aa, Mycoplasma iowae
MSNKKKITIGLDIGVSSVGWSILREDNVLIDYGSRLFPDAANAKDGKLENEARRSHRSMRRRIRRIKTRKNDLIKLLIKYNIISDQDELAKILEQGIVNETGNVPIVEIKYKGLKEKLSKEELLICLYHYIHKRGYFYITEEDLKENGENINRLPTEIQYDFYMKNGYYIGNEDNQKFSNLIWVKEIEKFLSKQSLDSNFVDEYISLFRRVRDYSDGPGSEKSPTP

SEQ ID NO: 562 - protein, 1304 aa, Mycoplasma synoviae
MLNNVQNLWKYLLLLIFDKKIIFLFKIKVILIRRYMENNNKEKIVIGFDLGVASVGWSIVNAETKEVIDLGVRLFSEPEKADYRRAKRTTRRLLRRKKFKREKFHKLILKNAEIFGLQSRNEILNVYKDQSSKYRNILKLKINALKEEIKPSELVWILRDYLQNRGYFYKNEKLTDEFVSNSFPSKKLHEHYEKYGFFRGSVKLDNKLDNKKDKAKEKDEEEESDAKKESEELIFSNKQWINEIVKVFENQSYLTESFKEEYLKLFNYVRPFNKGPGSKNSRTAYGVFSTDIDPETNKFKDYSNIWDKTIGKCSLFEEEIRAPKNLPSALIFNLQNEICTIKNEFTEFKNWWLNAEQKSEILKFVFTELFNWKDKKYSDKKFNKNLQDKIKKYLLNFALENFNLNEEILKNRDLENDTVLGLKGVKYYEKSNATADAALEFSSLKPLYVFIKFLKEKKLDLNYLLGLENTEILYFLDSIYLAISYSSDLKERNEWFKKLLKELYPKIKNNNLEIIENVEDIFEITDQEKFESFSKTHSLSREAFNHIIPLLLSNNEGKNYESLKHSNEELKKRTEKAELKAQQNQKYLKDNFLKEALVPLSVKTSVLQAIKIFNQIIKNFGKKYEISQVVIEMARELTKPNLEKLLNNATNSNIKILKEKLDQTEKFDDFTKKKFIDKIENSVVFRNKLFLWFEQDRKDPYTQLDIKINEIEDETEIDHVIPYSKSADDSWFNKLLVKKSTNQLKKNKTVWEYYQNESDPEAKWNKFVAWAKRIYLVQKSDKESKDNSEKNSIFKNKKPNLKFKNITKKLFDPYKDLGFLARNLNDTRYATKVFRDQLNNYSKHHSKDDENKLFKVVCMNGSITSFLRKSMWRKNEEQVYRFNFWKKDRDQFFHHAVDASIIAIFSLLTKTLYNKLRVYESYDVQRREDGVYLINKETGEVKKADKDYWKDQHNFLKIRENAIEIKNVLNNVDFQNQVRYSRKANTKLNTQLFNETLYGVKEFENNFYKLEKVNLFSRKDLRKFILEDLNEESEKNKKNENGSRKRILTEKYIVDEILQILENEEFKDSKSDINALNKYMDSLPSKFSEFFSQDFINKCKKENSLILTFDAIKHNDPKKVIKIKNLKFFREDATLKNKQAVHKDSKNQIKSFYESYKCVGFIWLKNKNDLEESIFVPINSRVIHFGDKDKDIFDFDSYNKEKLLNEINLKRPENKKFNSINEIEFVKFVKPGALLLNFENQQIYYISTLESSSLRAKIKLLNKMDKGKAVSMKKITNPDEYKIIEHVNPLGINLNWTKKLENNN

SEQ ID NO: 563 - protein, 1401 aa, Myroides injenensis
MKRILGLDLGTTSIGWAYVHEAENVNETSSIQKVGVRVNPLTTEEQTNFEKGKPITTNASRTLARSARRNLQRYKLRRDNLIQILKENNWINNTTSLTETGNHSTFETYELRNKAASEKLTLDQLSRVLLMLNKKRGYKSSRKVNSKEEGQLIDGMEVAKKLYHEQLTPGQLSLQLMNQGVKKLPDYYRSDLNQELESIWNFQQQFYPNILTDKFKEEINGKGLTSTSSAFWNIYNFNTAENKGSRDEKKKQALQWRSEALSKQLSKEIVAYIIADLNGQIYNSSGYLGAISDRSKELYFNNLTVGQYLFKQLKSNPHTSLKNQVFYRQDYLNEFEKIWETQSKFYPKELTAALKREIRDVIIFYQRKLKSQKGLISFCEFEQKQKTINGKTKTIGHRVIPKSSPLFQEFKIWQQLHNVVLRNKKTNEIVSLADEQKVHLFEELNLKGKLKSNQVLKLIENKPKDWELNYTELEGNNTNKALYNAYLDILDIEGYDVRNELKVKLNKDDIELSDLDVNASEIKEMIFSVFKHLGINTEILEFDATLEDKVFEKQASYQLWHLLYSYEEDNSPTGLDRLYNLLHKKFGFKLNHAKLIGNVLFQDDYGSLSSKAIKNIFPYITENNYYTACELAGYKHSKHSLTKEENETRELKNRLTILPKNSLRNPVVEKIINQMINVVNTLIDEENNILIAQGKEPNFQFDEIRIELARELKKNAKEREELTKSINKSKTDHEKIIKILQKEDGIKNPTRNDIVRFKLYSELKNNGYKDLYTNEYIERKDIFTKEYDIEHIIPQSKLFDDSFSNKTLVRRNVNLKKGNQTAYDFILCEYGQEKANEFETRITNLYNLGKDEGISKSKFKKLLMQESEIGNGFIERDLRETQYIAKKAKSLLLEITRNVISTSGSITDRLREDWGLINVMKELNLQKYRDAGLTEFVKMKDGNKKEVIIDWTKRNDHRHHAMDALTIAFTKHNHIQYLNHLNARKNVNNELHNNIIAIEKLETTLVSDERGNKKRIFKEPIANFRTIAKSHLEAILVSHKAKNKVVTKNINKISGKKISQQTLTPRGQLHKETIYGKIRQYVSKQEKVGPKFTIEVIEQVSNPTYRNLLLKRLEENNNDPKKAFGGKNSLNKNPIYINLEKNIKVPEVLKLVWLEDNYTIRKEISPDLKIDKVIDQGVKQILQNRLAQYKGDSKLAFSNLDANPIWLNEDKGIAIKRVTISGIATAQPLHRKKDHLGQPILDHNGQEIPVDFISTGNNHHVAIYEDENGKLQESVVSHFEAVERVNQKLPIIDKTFNQHLGWKFLFTMKQNELFLFPSDDFNPNEIDLFDKQNYTVISKHLFRIQKLSTKDYSFRHHLETNVEEIKDLKTITWRREGLNGIQNIIKVRTNHLGEIIHIGEY

SEQ ID NO: 564 - protein, 1466 aa, Myroides odoratus
MKNILGLDLGTNSIGWALVKEDFENKQGEILGLGSRIIPMSQDILGEFGRGNSISQTADRTGYRGVRRLRERHLLRRERLHRVLNILGFLPNHYAKEIDFTKRLGKFINHAEPKLSFDKEFIFKDSFNEMLKDFQQNQPGFIINKHGEEALVPYDWTIYYLRKKALTQKIDKEELAWILLNFNQKRGYYQLRGEEEEENTNKLVEFYSLKIIDVIADNEVNKKGEVWYSLHLENGWIYRRSSKISLVDWKDKVRDFIVTTDVNDDGSEKLDKDGVVKRSFRAPSADDWTLLKKKTEQDIDNSNKTVGAYIYENLLLNPKQKIKGKLVRTIERKFYKDELKQILEKQKEFHQELQNEQLLQDCVRELYKYNEQHQQMLESKDFVHLFLNDIIFYQRPLRSQKSLISNCTLEKRVSRDGVVFPIKVISKSNPYYQEFRLLQWLQNLAIYRKDDDVNVTQEFLNSIESWENLLQFLNAKKEIKQEQLIKFLLEQKGLKGNSLKTAILTYRWNYVTDKVYPMNETRSLIQDKLKKVENVATDFLSFDNEMALWHIIYSVNDKIEYEKALAKFASKHNLDEISFVESFKKFPPFKSDYGSFSEKAIKKLLPLMRFGSVWNKNNIVPSVLDRIDKILTGEYDEKIKIRVREKAEQFQLNQIEDFQNLPLWLAQYVVYDRHSEAEIAGKWNSVKDLENYLKEFKQHSLRNPIVEQIITETLRVVKDIWQQYGNGVQNFFDEIHIELGREMKNTADERKRITNSVTENENTNLRIKALLVELKEDTNIENVRPHSPMQQEILKIYEEGVLNAVENIDEDILKISKTAQPSKSELIRYKLWLEQKYQSPYTGEMIPLSRLFTSDYEIEHVIPQSRYFDDSLSNKVICEAAVNKRKDNQLGLEFIKNHHSEKIELGNGRTAQVLEVEAYESFVKKNYDKNRGKRNKLLLEDVPEKMIERQLNDTRYISKFVTHLLSNIVRKDEVNSKDDGINSKNIIPGNGKITSQLKQDWGLNDVWNELILPRFERMNNLTNSTDFTSTNTNGKIIPTVPLEYSKGFSKKRIDHRHHALDALVIALATRDHVNLLNNESALPKKDRTKEEQKSFRFDLQVNLRNKEKYFNVKEGREKEKFTTFKKPWNTLTQDTRDALENMVVSFKQNLRVINKATNYYESYTDENGNLRLDKYGNPKKELISQKGTNWAIRKSLHKETVSGQIHLDRVKVTKGKIVTATRKSLDSSFNEKSIESITDTGIQKILRNYLKAKDNKPDVAFSPEGIEELNKSISVYNEGKNHQPIIKVRIFEQGSKFPVGETGNKIAKFVEAAKGTNLFFGIYQDKTGKRSYDTIPLNLVIERLKQGLSPVPETNEKGHQLLFHLSPNDLVYVPTIDDNEQLDSNRVYKFTDSSDTTCNFIPSNISAIIFNINSKEQEKRGINYPIQNELGVGSPQSKNQKSFDGFMIKEVCIKLKVDRLGNISKT

SEQ ID NO: 565 - protein, 241 aa, Neisseria lactamica
MAAFKPNPMNYILGLDIGIASVGWAMVEIDKEENPIRLIDLGVRVFERAEMPKTGDSLAMARRLARSVRRLTRRRAHRLLRARRLLKREGVLQDADFDENGLVKSLPNTPWQLRAAALDRKLTCLEWSAVLLHLIKHRGYLSQRKNEGETADKELGALLKGVADNAHALQTGDFRTPAELALNKFEKESGHIRNQRGDYSHTFSRKDLQAELNLLFEKQKEFGNPHVSDGLKEGIETLLMA

SEQ ID NO: 566 - protein, 666 aa, Neisseria lactamica
MAAFKPNPMNYILGLDIGIASVGWAMVEVDEEENPIRLIDLGVRVFERAEVPKTGDSLAMARRLARSVRRLTRRRAHRLLRARRLLKREGVLQDADFDENGLVKSLPNTPWQLRAAALDRKLTCLEWSAVLLHLVKHRGYLSQRKNEGETADKELGALLKGVADNAHALQTGDFRTPAELALNKFEKESGHIRNQRGDYSHTFSRKDLQAELNLLFEKQKEFGNPHVSDGLKEDIETLLMAQRPALSGDAVQKMLGHCTFEPAEPKAAKNTYTAERFIWLTKLNNLRILEQGSERPLTDTERATLMDEPYRKSKLTYAQARKLLGLEDTAFFKGLRYGKDNAEASTLMEMKAYHAISRALEKEGLKDKKSPLNLSTELQDEIGTAFSLFKTDKDITGRLKDRVQPEILEALLKHISFDKFVQISLKALRRIVPLMEQGKRYDEACAEIYGDHYCKKNAEEKIYLPPIPADEIRNPVVLRALSQARKVINCVVRRYGSPARIHIETAREVGKSFKDRKEIEKRQEENRKDREKAAAKFREYFPNFVGEPKSKDILKLRLYEQQHGKCLYSGKEINLVRLNEKGYVEIDHALPFSRTWDDSFNNKVLVLGSENQNKGNQTPYEYFNGKDNSREWQEFKARVETSRFPRSKNNGFCCKNSMKKDLKNAT

SEQ ID NO: 567 - protein, 828 aa, Neisseria lactamica
MLGHCTFEPAEPKAAKNTYTAERFIWLTKLNNLRILEQGSERPLTDTERATLMDEPYRKSKLTYAQARKLLGLEDTAFFKGLRYGKDNAEASTLMEMKAYHAISRALEKEGLKDKKSPLNLSTELQDEIGTAFSLFKTDKDITGRLKDRVQPEILEALLKHISFDKFVQISLKALRRIVPLMEQGKRYDEACAEIYGDHYGKKNTEEKIYLPPIPADEIRNPVVLRALSQARKVINAVVRRYDSPARIHIETAREVGKSFKDRKEIEKRQEENRKDREKAAAKFREYFPNFVGEPKSKDILKLRLYEQQHGKCLYSGKEINLVRLNEKGYVEIDHALPFSRTWDDSFNNKVLVLGSENQNKGNQTPYEYFNGKDNSREWQEFKARVETSRFPRSKKQRILLQKFDEEGFKERNLNDTRYVNRFLCQFVADHILLTGKGKRRVFASNGQITNLLRGFWGLRKVRAENDRHHALDAVVVACSTVAMQQKITRFVRYKEMNAFDGKTIDKETGEVLHQKAHFPQPWEFFAQEVMIRVFGKPDGKPEFEEADTSEKLRTLLAEKLSSRPEAVHEYVTPLFVSRAPNRKMSGQGHMETVKSAKRLDEGISVLRVPLTQLKLKDLEKMVNREREPKLYDALKAQLETHKDDPAKAFAEPFYKYDKAGSRTQQVKAVRIEQVQKTGVWVRNHNGIADNATMVRVDVFEKGGKYYLVPIYSWQVAKGILPDRAVVAFKDEEDWTVMDDSFEFRFVLYANDLIKAELKKETFFGYFSGLDRSTGNISLRSHDLDKTKGKDGVYRIGIKTALSFQKHQIDELGKEIRPCRLKKRPPVR

SEQ ID NO: 568 - protein, 408 aa, Neisseria lactamica
MNDTRYVNRFLCQFVADHILLTGKGKRRVFASNGQITNLLRGFWGLRKVRTENDRHHALDAVVVACSTVAMQQKITRFVRYKEMNAFDGKTIDKETGEVLHQKAHFPQPWEFFAQEVMIRVFGKPDGKPEFEEADTPEKLRTLLAEKLSSRPEAVHEYVTPLFVSRAPNRKMSGQGHMETVKSAKRLDEGISVLRVPLTQLKLKGLEKMVNREREPKLYDALKAQLETHKDDPAKAFAEPFYKYDKAGSRTQQVKAVRIEQVQKTGVWVRNHNGIADNATMVRVDVFEKGGKYYLVPIYSWQVAKGILPDRAVVAFKDEEDWTVMDDSFEFRFVLYANDLIKLTAKKNEFLGYFVSLNRATGAIDIRTHDTDSTKGKNGIFQSVGVKTALSFQKTKSTNSAKKSDHAV

SEQ ID NO: 569 - protein, 1082 aa, Neisseria meningitidis
MAAFKPNPINYILGLDIGIASVGWAMVEIDEDENPICLIDLGVRVFERAEVPKTGDSLAAARRLARSVRRLTRRRAHRLLRARRLLKREGVLQAADFDENGLIKSLPNTPWQLRAAALDRKLTPLEWSAVLLHLIKHRGYLSQRKNEGETADKELGALLKGVADNAHALQTGDFRTPAELALNKFEKESGHIRNQRGDYSHTFSRKDLQAELILLFEKQKEFGNPHVSGGLKEGIETLLMTQRPALSGDAVQKMLGHCTFEPAEPKAAKNTYTAERFIWLTKLNNLRILEQGSERPLTDTERATLMDEPYRKSKLTYAQARKLLGLEDTAFFKGLRYGKDNAEASTLMEMKAYHAISRALEKEGLKDKKSPLNLSPELQDEIGTAFSLFKTDEDITGRLKDRVQPEILEALLKHISFDKFVQISLKALRRIVPLMEQGKRYDEACAEIYGDHYGKKNTEEKIYLPPIPADEIRNPVVLRALSQARKVINGVVRRYGSPARIHIETAREVGKSFKDRKEIEKRQEENRKDREKAAAKFREYFPNFVGEPKSKDILKLRLYEQQHGKCLYSGKEINLGRLNEKGYVEIDHALPFSRTWDDSFNNKVLVLGSENQNKGNQTPYEYFNGKDNSREWQEFKARVETSRFPRSKKQRILLQKFDEDGFKERNLNDTRYVNRFLCQFVADRMRLTGKGKKRVFASNGQITNLLRGFWGLRKVRAENDRHHALDAVVVACSTVAMQQKITRFVRYKEMNAFDGKTIDKETGEVLHQKTHFPQPWEFFAQEVMIRVFGKPDGKPEFEEADTPEKLRTLLAEKLSSRPEAVHEYVTPLFVSRAPNRKMSGQGHMETVKSAKRLDEGVSVLRVPLTQLKLKDLEKMVNREREPKLYEALKARLEAHKDDPAKAFAEPFYKYDKAGNRTQQVKAVRVEQVQKTGVWVRNHNGIADNATMVRVDVFEKGDKYYLVPIYSWQVAKGILPDRAVVQGKDEEDWQLIDDSFNFKFSLHPNDLVEVITKKARMFGYFASCHRGTGNINIRIHDLDHKIGKNGILEGIGVKTALSFQKYQIDELGKEIRPCRLKKRPPVR

SEQ ID NO: 570 - protein, 976 aa, Neisseria meningitidis
MAAFKPNPINYILGLDIGIASVGWAMVEIDEDENPICLIDLGVRVFERAEVPKTGDSLAAARRLARSVRRLTRRRAHRLLRARRLLKREGVLQAADFDENGLIKSLPNTPWQLRAAALDRKLTPLEWSAVLLHLIKHRGYLSQRKNEGETADKELGALLKGVADNAHALQTGDFRTPAELALNKFEKESGHIRNQRGDYSHTFSRKDLQAELILLFEKQKEFGNPHVSGGLKEGIETLLMTQRPALSGDAVQKMLGHCTFEPAEPKAAKNTYTAERFIWLTKLNNLRILEQGSERPLTDTERATLMDEPYRKSKLTYAQARKLLGLEDTAFFKGLRYGKDNAEASTLMEMKAYHAISRALEKEGLKDKKSPLNLSPELQDEIGTAFSLFKTDEDITGRLKDRIQPEILEALLKHISFDKFVQISLKALRRIVPLMEQGKRYDEACAEIYGDHYGKKNTEEKIYLPPIPADEIRNPVVLRALSQARKVINGVVRRYGSPARIHIETAREVGKSFKDRKEIEKRQEENRKDREKAAAKFREYFPNFVGEPKSKDILKLRLYEQQHGKCLYSGKEINLGRLNEKGYVEIDHALPFSRTWDDSFNNKVLVLGSENQNKGNQTPYEYFNGKDNSREWQEFKARVETSRFPRSKKQRILLQKFDEDGFKERNLNDTRYVNRFLCQFVADRMRLTGKGKKRVFASNGQITNLLRGFWGLRKVRAENDRHHALDAVVVACSTVAMQQKITRFVRYKEMNAFDGKTIDKETGEVLHQKTHFPQPWEFFAQEVMIRVFGKPDGKPEFEEADTPEKLRTLLAEKLSSRPEAVHEYVTPLFVSRAPNRKMSGQGHMETVKSAKRLDEGVSVLRVPLTQLKLKDLEKMVNREREPKLYEALKARLEAHKDDPAKAFAEPFYKYDKAGNRTQQVKAVRVEQVQKTGVWVRNHNGIADNATMVRVDVFEKGDKYYLVPIYSWQVAKGIFAG

SEQ ID NO: 571 - protein, 1081 aa, Neisseria meningitidis
MAAFKPNPINYILGLDIGIASVGWAMVEIDEDENPICLIDLGVRVFERAEVPKTGDSLAAARRLARSVRRLTRRRAHRLLRARRLLKREGVLQAADFDENGLIKSLPNTPWQLRSAALDRKLTPLEWSAVLLHLIKHRGYLSQRKNEGETADKELGALLKGVADNAHALQTGDFRTPAELALNKFEKESGHIRNRRGDYSHTFSRKDLQAELDLLFEKQKEFGNPHISDDLKEGIETLLMTQRPALSGDAVQKMLGHCTFEPTEPKAAKNTYTAERFVWLTKLNNLRILEQGSERPLTDTERATLMDEPYRKSKLTYAQARKLLELDDTAFFKGLRYGKDNAEASTLMEMKAYHAISRALEKEGLKDKKSPLNLSPELQDEIGTAFSLFKTDEDITGRLKDRVQPEILEVLLKHISFDKFVQISLKALRRIVPLMEQGKRYDEACAEIYGDHDGKKNTEEKIYLPPIPADEIRNPVVLRALSQARKVINAVVRRYGSPARIHIETAREVGKSFKDRKEIEKRQEENRKDREKAAAKFREYFPNFVGEPKSKDILKLRLYEQQHGKCLYSGKEINLGRLNEKGYVEIDHALPFSRTWDDSFNNKVLVLGSENQNKGNQTPYEYFNGKDNSREWQEFKARVETSRFPRSKKQRILLQKFDEEGFKERNLNDTRYVNRFLCQFVADHMLLTGKGKRRVFASNGQITNLLRGFWGLRKVRAENNRHHALDAVVVACSTVAMQQKITRFVRYKEMNAFDGKTIDKETGEVLHQKTHFPQPWEFFAQEVMIRVFGKPDGKPEFEEADTPEKLRTLLAEKLSSRPEAVHEYVTPLFVSRAPNRKMSGQGHMETVKSAKRLDEGVSVLRVPLTQLKLKDLEKMVNREREPKLYEALKARLEAHKDDPAKAFAEPFYKYDKAGNRTQQVKAVRVEQVQKTGVWVRNHNGIADNATMVRVDVFEKAGKYYLVPIYSWQVAKGILPDRAVVAYADEEGWTVIDESFRFKFVLYSNDLIKVQLKKDSFLGYFSGLDRATGAISLREHDLEKSKGKDGMHRIGVKTALSFQKYQIDEMGKEIRLCRLKKRPPVR

SEQ ID NO: 572 - protein, 1081 aa, Neisseria meningitidis
MAAFKPNPINYILGLDIGIASVGWAMVEIDEDENPICLIDLGVRVFERAEVPKTGDSLAAARRLARSVRRLTRRRAHRLLRARRLLKREGVLQAADFDENGLIKSLPNTPWQLRSAALDRKLTPLEWSAVLLHLIKHRGYLSQRKNEGETADKELGALLKGVANNAHALQTGDFRTPAELALNKFEKESGHIRNQRGDYSHTFSRKDLQAELILLFEKQKEFGNPHVSGGLKEGIETLLMTQRPALSGDAVQKMLGHCTFEPAEPKAAKNTYTAERFIWLTKLNNLRILEQGSERPLTDTERATLMDEPYRKSKLTYAQARKLLGLEDTAFFKGLRYGKDNAEASTLMEMKAYHAISRALEKEGLKDKKSPLNLSPELQDEIGTAFSLFKTDEDITGRLKDRIQPEILEALLKHISFDKFVQISLKALRRIVPLMEQGKRYDEACAEIYGDHYGKKNTEEKIYLPPIPADEIRNPVVLRALSQARKVINGVVRRYGSPARIHIETAREVGKSFKDRKEIEKRQEENRKDREKAAAKFREYFPNFVGEPKSKDILKLRLYEQQHGKCLYSGKEINLGRLNEKGYVEIDHALPFSRTWDDSFNNKVLVLGSENQNKGNQTPYEYFNGKDNSREWQEFKARVETSRFPRSKKQRILLQKFDEDGFKERNLNDTRYVNRFLCQFVADRMRLTGKGKKRVFASNGQITNLLRGFWGLRKVRAENDRHHALDAVVVACSTVAMQQKITRFVRYKEMNAFDGKTIDKETGEVLHQKTHFPQPWEFFAQEVMIRVFGKPDGKPEFEEADTPEKLRTLLAEKLSSRPEAVHEYVTPLFVSRAPNRKMSGQGHMETVKSAKRLDEGVSVLRVPLTQLKLKDLEKMVNREREPKLYEALKARLEAHKDDPAKAFAEPFYKYDKAGNRTQQVKAVRVEQVQKTGVWVRNHNGIADNATMVRVDVFEKAGKYYLVPIYSWQVAKGILPDRAVVAYADEEGWTVIDESFRFKFVLYSNDLIKVQLKKDSFLGYFSGLDRATGAISLREHDLEKSKGKDGMHRIGVKTALSFQKYQIDEMGKEIRLCRLKKRPPVR

SEQ ID NO: 573 - protein, 1082 aa, Neisseria meningitidis
MAAFKPNPINYILGLDIGIASVGWAMVEIDEDENPICLIDLGVRVFERAEVPKTGDSLAMARRLARSVRRLTRRRAHRLLRARRLLKREGVLQAADFDENGLIKSLPNTPWQLRAAALDRKLTPLEWSAVLLHLIKHRGYLSQRKNEGETADKELGALLKGVADNAHALQTGDFRTPAELALNKFEKESGHIRNQRGDYSHTFSRKDLQAELILLFEKQKEFGNPHVSGGLKEGIETLLMTQRPALSGDAVQKMLGHCTFEPAEPKAAKNTYTAERFIWLTKLNNLRILEQGSERPLTDTERATLMDEPYRKSKLTYAQARKLLGLEDTAFFKGLRYGKDNAEASTLMEMKAYHAISRALEKEGLKDKKSPLNLSPELQDEIGTAFSLFKTDEDITGRLKDRIQPEILEALLKHISFDKFVQISLKALRRIVPLMEQGKRYDEACAEIYGDHYGKKNTEEKIYLPPIPADEIRNPVVLRALSQARKVINGVVRRYGSPARIHIETAREVGKSFKDRKEIEKRQEENRKDREKAAAKFREYFPNFVGEPKSKDILKLRLYEQQHGKCLYSGKEINLGRLNEKGYVEIDHALPFSRTWDDSFNNKVLVLGSENQNKGNQTPYEYFNGKDNSREWQEFKARVETSRFPRSKKQRILLQKFDEDGFKERNLNDTRYVNRFLCQFVADRMRLTGKGKKRVFASNGQITNLLRGFWGLRKVRAENDRHHALDAVVVACSTVAMQQKITRFVRYKEMNAFDGKTIDKETGEVLHQKTHFPQPWEFFAQEVMIRVFGKPDGKPEFEEADTPEKLRTLLAEKLSSRPEAVHEYVTPLFVSRAPNRKMSGQGHMETVKSAKRLDEGVSVLRVPLTQLKLKDLEKMVNREREPKLYEALKARLEAHKDDPAKAFAEPFYKYDKAGNRTQQVKAVRVEQVQKTGVWVRNHNGIADNATMVRVDVFEKGDKYYLVPIYSWQVAKGILPDRAVVQGKDEEDWQLIDDSFNFKFSLHPNDLVEVITKKARMFGYFASCHRGTGNINIRIHDLDHKIGKNGILEGIGVKTALSFQKYQIDELGEEIRPCRLKKRPPVR

SEQ ID NO: 574 - protein, 1082 aa, Neisseria meningitidis
MAAFKPNPINYILGLDIGIASVGWAMVEIDEDENPICLIDLGVRVFERAEVPKTGDSLAMARRLARSVRRLTRRRAHRLLRARRLLKREGVLQAADFDENGLIKSLPNTPWQLRAAALDRKLTPLEWSAVLLHLIKHRGYLSQRKNEGETADKELGALLKGVADNAHALQTGDFRTPAELALNKFEKESGHIRNQRGDYSHTFSRKDLQAELILLFEKQKEFGNPHVSGGLKEGIETLLMTQRPALSSDAVQKMLGHCTFEPAEPKAAKNTYTAERFIWLTKLNNLRILEQGSERPLTDTERATLMDEPYRKSKLTYAQARKLLGLEDTAFFKGLRYGKDNAEASTLMEMKAYHAISRALEKEGLKDKKSPLNLSPELQDEIGTAFSLFKTDEDITGRLKDRIQPEILEALLKHISFDKFVQISLKALRRIVPLMEQGKRYDEACAEIYGDHYGKKNTEEKIYLPPIPADEIRNPVVLRALSQARKVINGVVRRYGSPARIHIETAREVGKSFKDRKEIEKRQEENRKDREKAAAKFREYFPNFVGEPKSKDILKLRLYEQQHGKCLYSGKEINLGRLNEKGYVEIDHALPFSRTWDDSFNNKVLVLGSENQNKGNQTPYEYFNGKDNSREWQEFKARVETSRFPRSKKQRILLQKFDEDGFKERNLNDTRYVNRFLCQFVADRMRLTGKGKKRVFASNGQITNLLRGFWGLRKVRAENDRHHALDAVVVACSTVAMQQKITRFVRYKEMNAFDGKTIDKETGEVLHQKTHFPQPWEFFAQEVMIRVFGKPDGKPEFEEADTPEKLRTLLAEKLSSRPEAVHEYVTPLFVSRAPNRKMSGQGHMETVKSAKRLDEGVSVLRVPLTQLKLKDLEKMVNREREPKLYEALKARLEAHKDDPAKAFAEPFYKYDKAGNRTQQVKAVRVEQVQKTGVWVRNHNGIADNATMVRVDVFEKGDKYYLVPIYSWQVAKGILPDRAVVQGKDEEDWQLIDDSFNFKFSLHPNDLVEVITKKARMFGYFASCHRGTGNINIRIHDLDHKIGKNGILEGIGVKTALSFQKYQIDELGKEIRPCRLKKRPPVR

SEQ ID NO: 575 - protein, 1082 aa, Neisseria meningitidis
MAAFKPNPINYILGLDIGIASVGWAMVEIDEDENPICLIDLGVRVFERAEVPKTGDSLAMARRLARSVRRLTRRRAHRLLRARRLLKREGVLQAADFDENGLIKSLPNTPWQLRAAALDRKLTPLEWSAVLLHLIKHRGYLSQRKNEGETADKELGALLKGVADNAHALQTGDFRTPAELALNKFEKESGHIRNQRGDYSHTFSRKDLQAELILLFEKQKEFGNPHVSGGLKEGIETLLMTQRPALSSDAVQKMLGHCTFEPAEPKAAKNTYTAERFIWLTKLNNLRILEQGSERPLTDTERATLMDEPYRKSKLTYAQARKLLGLEDTAFFKGLRYGKDNAEASTLMEMKAYHAISRALEKEGLKDKKSPLNLSPELQDEIGTAFSLFKTDEDITGRLKDRIQPEILEALLKHISFDKFVQISLKALRRIVPLMEQGKRYDEACAEIYGDHYGKKNTEEKIYLPPIPADEIRNPVVLRALSQARKVINGVVRRYGSPARIHIETAREVGKSFKDRKEIEKRQEENRKDREKAAAKFREYFPNFVGEPKSKDILKLRLYEQQHGKCLYSGKEINLGRLNEKGYVEIDHALPFSRTWDDSFNNKVLVLGSENQNKGNQTPYEYFNGKDNSREWQEFKARVETSRFPRSKKQRILLQKFDEDGFKERNLNDTRYVNRFLYQFVADRMRLTGKGKKRVFASNGQITNLLRGFWGLRKVRAENDRHHALDAVVVACSTVAMQQKITRFVRYKEMNAFDGKTIDKETGEVLHQKTHFPQPWEFFAQEVMIRVFGKPDGKPEFEEADTPEKLRTLLAEKLSSRPEAVHEYVTPLFVSRAPNRKMSGQGHMETVKSAKRLDEGVSVLRVPLTQLKLKDLEKMVNREREPKLYEALKARLEAHKDDPAKAFAEPFYKYDKAGNRTQQVKAVRVEQVQKTGVWVRNHNGIADNATMVRVDVFEKGDKYYLVPIYSWQVAKGILPDRAVVQGKDEEDWQLIDDSFNFKFSLHPNDLVEVITKKARMFGYFASCHRGTGNINIRIHDLDHKIGKNGILEGIGVKTALSFQKYQIDELGKEIRPCRLKKRPPVR

SEQ ID NO: 576 - protein, 1081 aa, Neisseria meningitidis
MAAFKPNPINYILGLDIGIASVGWAMVEIDEDENPICLIDLGVRVFERAEVPKTGDSLAMARRLARSVRRLTRRRAHRLLRARRLLKREGVLQAADFDENGLIKSLPNTPWQLRAAALDRKLTPLEWSAVLLHLIKHRGYLSQRKNEGETADKELGALLKGVADNAHALQTGDFRTPAKLALNKFEKESGHIRNQRGDYSHTFSRKDLQAELNLLFEKQKEFGNPHISDGLKEGIETLLMTQRPALSGDAVQKMLGHCTFEPTEPKAAKNTYTAERFVWLTKLNNLRILEQGSEQPLTDTQRAKLMDEPYRKSKLTYAQARKLLGLEDTAFFKGLRYGKDNAEASTLMEMKAYHAISRALEKEGLKDKKSPLNLSPELQDEIGTAFSLFKTDEDITGRLKDRVQPEILEALLKHISFDKFVQISLKALRRIVPLMEQGKRYNEACAEIYGDHYGKKNTEEKIYLPPIPADEIRNPVVLRALSQARKVINGVVRRYGSPARIHIETAREVGKSFKDRKEIEKRQEENRKDREKAAAKFQEYFPNFVGEPKSKDILKLRLYEQQHGKCLYSGKEINLGRLNEKGYVEIDHALPFSRTWDDSFNNKVLVLGSENQNKGNQTPYEYFNGKDNSREWQEFKARVETSRFPRSKKQRILLQKFDEDGFKERNLNDTRYVNRFLCQFVADRMRLTGKGKKRVFASNGQITNLLRGFWGLRKVRAENDRHHALDAVVVACSTVAMQQKITRFVRYKEMNAFDGKTIDKETGEVLHQKTHFPQPWEFFAQEVMIRVFGKPDGKPEFEEADTPEKLRTLLAEKLSSRPEAVHEYVTPLFVSRAPNRKMSGQGHMETVKSAKRLDEGVSVLRVPLTQLKLKDLEKMVNREREPKLYEALKARLEAHKDDPAKAFAEPFYKYDKAGNRTQQVKAVRVEQVQKTGVWVRNHNGIADNATMVRVDVFEKGDKYYLVPIYSWQVAKGILPDRAVVAYADEEDWTVIDESFRFKFVLYSNDLIKVQLKKDSFLGYFSGLDRATGAISLREHDLEKSKGKDGMHRIGVKTALSFQKYQIDEMGKEIRPCRLKKRPPVR

SEQ ID NO: 577 - protein, 1081 aa, Neisseria meningitidis
MAAFKPNPINYILGLDIGIASVGWAMVEIDEEENPIRLIDLGVRVFERAEVPKTGDSLAMARRLARSVRRLTRRRAHRLLRARRLLKREGVLQAADFDENGLIKSLPNTPWQLRAAALDRKLTPLEWSAVLLHLIKHRGYLSQRKNEGETADKELGALLKGVADNAHALQTGDFRTPAELALNKFEKECGHIRNQRGDYSHTFSRKDLQAELNLLFEKQKEFGNPHVSGGLKEGIETLLMTQRPALSGDAVQKMLGHCTFEPAEPKAAKNTYTAERFIWLTKLNNLRILEQGSERPLTDTERATLMDEPYRKSKLTYAQARKLLSLEDTAFFKGLRYGKDNAEASTLMEMKAYHTISRALEKEGLKDKKSPLNLSPELQDEIGTAFSLFKTDEDITGRLKDRIQPEILEALLKHISFDKFVQISLKALRRIVPLMEQGKRYDEACAEIYGDHYGKKNTEEKIYLPPIPADEIRNPVVLRALSQARKVINGVVRRYGSPARIHIETAREVGKSFKDRKEIEKRQEENRKDREKAAAKFREYFPNFVGEPKSKDILKLRLYEQQHGKCLYSGKEINLGRLNEKGYVEIDHALPFSRTWDDSFNNKVLVLGSENQNKGNQTPYEYFNGKDNSREWQEFKARVETSRFPRSKKQRILLQKFDEDGFKERNLNDTRYVNRFLCQFVADRMRLTGKGKKRVFASNGQITNLLRGFWGLRKVRAENDRHHALDAVVVACSTVAMQQKITRFVRYKEMNAFDGKTIDKETGEVLHQKTHFPQPWEFFAQEVMIRVFGKPDGKPEFEEADTPEKLRTLLAEKLSSRPEAVHEYVTPLFVSRAPNRKMSGQGHMETVKSAKRLDEGVSVLRVPLTQLKLKDLEKMVNREREPKLYEALKARLEAHKDDPAKAFAEPFYKYDKAGNRTQQVKAVRVEQVQKTGVWVRNHNGIADNATMVRVDVFEKGDKYYLVPIYSWQVAKGILPDRAVVAYADEEDWTVIDESFRFKFVLYSNDLIKVQLKKDSFLGYFSGLDRATGAISLREHDLEKSKGKDGMHRIGVKTALSFQKYQIDEMGKEIRPCRLKKRPPVR

SEQ ID NO: 578 - protein, 1082 aa, Neisseria meningitidis
MAAFKPNPINYILGLDIGIASVGWAMVEIDEEENPIRLIDLGVRVFERAEVPKTGDSLAMARRLARSVRRLTRRRAHRLLRARRLLKREGVLQAADFDENGLIKSLPNTPWQLRAAALDRKLTPLEWSAVLLHLIKHRGYLSQRKNEGETADKELGALLKGVADNAHALQTGDFRTPAELALNKFEKECGHIRNQRGDYSHTFSRKDLQAELNLLFEKQKEFGNPHVSGGLKEGIETLLMTQRPALSGDAVQKMLGHCTFEPAEPKAAKNTYTAERFIWLTKLNNLRILEQGSERPLTDTERATLMDEPYRKSKLTYAQARKLLGLEDTAFFKGLRYGKDNAEASTLMEMKAYHAISRALEKEGLKDKKSPLNLSPELQDEIGTAFSLFKTDEDITGRLKDRIQPEILEALLKHISFDKFVQISLKALRRIVPLMEQGKRYDEACAEIYGDHYGKKNTEEKIYLPPIPADEIRNPVVLRALSQARKVINGVVRRYGSPARIHIETAREVGKSFKDRKEIEKRQEENRKDREKAAAKFREYFPNFVGEPKSKDILKLRLYEQQHGKCLYSGKEINLVRLNEKGYVEIDHALPFSRTWDDSFNNKVLVLGSENQNKGNQTPYEYFNGKDNSREWQEFKARVETSRFPRSKKQRILLQKFDEEGFKERNLNDTRYVNRFLCQFVADHILLTGKGKRRVFASNGQITNLLRGFWGLRKVRAENDRHHALDAVVVACSTVAMQQKITRFVRYKEMNAFDGKTIDKETGEVLHQKTHFPQPWEFFAQEVMIRVFGKPDGKPEFEEADTPEKLRTLLAEKLSSRPEAVHEYVTPLFVSRAPNRKMSGQGHMETVKSAKRLDEGVSVLRVPLTQLKLKDLEKMVNREREPKLYEALKARLEAHKDDPAKAFAEPFYKYDKAGNRTQQVKAVRVEQVQKTGVWVRNHNGIADNATMVRVDVFEKGGKYYLVPIYSWQVAKGILPDRAVVQGKDEEDWQLIDDSFNFKFSLHPNDLVEVITKKARMFGYFASCHRGTGNINIRIHDLDHKIGKNGILEGIGVKTALSFQKYQIDELGKEIRPCRLKKRPPVR

SEQ ID NO: 579 - protein, 1081 aa, Neisseria meningitidis
MAAFKPNPINYILGLDIGIASVGWAMVEIDEEENPIRLIDLGVRVFERAEVPKTGDSLAMARRLARSVRRLTRRRAHRLLRARRLLKREGVLQAADFDENGLIKSLPNTPWQLRAAALDRKLTPLEWSAVLLHLIKHRGYLSQRKNEGETADKELGALLKGVADNAHALQTGDFRTPAELALNKFEKESGHIRNQRGDYSHTFSRKDLQAELILLFEKQKEFGNPHVSGGLKEGIETLLMTQRPALSGDAVQKMLGHCTFEPAEPKAAKNTYTAERFIWLTKLNNLRILEQGSERPLTDTERATLMDEPYRKSKLTYAQARKLLGLEDTAFFKGLRYGKDNAEASTLMEMKAYHAISRALEKEGLKDKKSPLNLSPELQDEIGTAFSLFKTDEDITGRLKDRVQPEILEALLKHISFDKFVQISLKALRRIVPLMEQGKRYDEACAEIYGDHYGKKNTEEEIYLPPITADEIRNPVVLRALSQARKVINAVVRRYGSPARIHIETAREVGKSFKDRKEIEKRQEENRKDREKAAAKFREYFPNFVGEPKSKDILKLRLYEQQHGKCLYSGKEINLVRLNEKGYVEIDHALPFSRTWDDSFNNKVLVLGSENQNKGNQTPYEYFNGKENSREWQEFKARVETSRFPRSKKQRILLQKFDEDGFKERNLNDTRYVNRFLCQFVADRMRLTGKGKKRVFASNGQITNLLRGFWGLHKVRAENDRHHALDAVVVACSTIAMQQKITRFVRYKEMNAFDGKTIDKETGEVLHQKAHFPQPWEFFAQEVMIRVFGKPDGKPEFEEADTPEKLRTLLAEKLSSRPEAVHEYVTPLFVSRAPNRKMSGQGHMETVKSAKRLDEGISVLRVPLTQLKLKDLEKMVNRAREPKLYEALKARLEAHKDDPAKAFAEPFYKYDKAGNRTQQVKAVRVEQVQKTGVWVRNHNGIADNATMVRVDVFEKAGKYYLVPIYSWQVAKGILPDRAVVAYADEEDWTVIDESFRFKFVLYSNDLIKVQLKKDSFLGYFSGLDRATGAISLREHDLEKSKGKDGMHRIGVKTALSFQKYQIDEMGKEIRPCRLKKRPPVR

SEQ ID NO: 580 - protein, 1082 aa, Neisseria meningitidis
MAAFKPNPINYILGLDIGIASVGWAMVEIDEEENPIRLIDLGVRVFERAEVPKTGDSLAMARRLARSVRRLTRRRAHRLLRARRLLKREGVLQAADFDENGLIKSLPNTPWQLRAAALDRKLTPLEWSAVLLHLIKHRGYLSQRKNEGETADKELGALLKGVANNAHALQTGDFRTPAELALNKFEKESGHIRNQRGDYSHTFSRKDLQAELILLFEKQKEFGNPHVSGGLKEGIETLLMTQRPALSGDAVQKMLGHCTFEPAEPKAAKNTYTAERFIWLTKLNNLRILEQGSERPLTDTERATLMDEPYRKSKLTYAQARKLLGLEDTAFFKGLRYGKDNAEASTLMEMKAYHAISRALEKEGLKDKKSPLNLSSELQDEIGTAFSLFKTDEDITGRLKDRVQPEILEALLKHISFDKFVQISLKALRRIVPLMEQGKRYDEACAEIYGDHYGKKNTEEKIYLPPIPADKIRNPVVLRALSQARKVINGVVRRYGSPARIHIETAREVGKSFKDRKEIEKRQEENRKDREKAAAKFREYFPNFVGEPKSKDILKLRLYEQQHGKCLYSGKEINLVRLNEKGYVEIDHALPFSRTWDDSFNNKVLVLGSENQNKGNQTPYEYFNGKDNSREWQEFKARVETSRFPRSKKQRILLQKFDEDGFKECNLNDTRYVNRFLCQFVADHILLTGKGKRRVFASNGQITNLLRGFWGLRKVRAENDRHHALDAVVVACSTVAMQQKITRFVRYKEMNAFDGKTIDKETGKVLHQKTHFPQPWEFFAQEVMIRVFGKPDGKPEFEEADTPEKLRTLLAEKLSSRPEAVHEYVTPLFVSRAPNRKMSGAHKDTLRSAKRFVKHNEKISVKRVWLTEIKLADLENMVNYKNGREIELYEALKARLEAYGGNAKQAFDPKDNPFYKKGGQLVKAVRVEKTQESGVLLNKKNAYTIADNGDMVRVDVFCKVDKKGKNQYFIVPIYAWQVAENILPDIDCKGYRIDDSYTFCFSLHKYDLIAFQKDEKSKVEFAYYINCDSSNGRFYLAWHDKGSKEQQFRISTQNLVLIQKYQVNELGKEIRPCRLKKRPPVR

SEQ ID NO: 581 - protein, 1082 aa, Neisseria meningitidis
MAAFKPNPINYILGLDIGIASVGWAMVEIDEEENPIRLIDLGVRVFERAEVPKTGDSLAMARRLARSVRRLTRRRAHRLLRARRLLKREGVLQAADFDENGLIKSLPNTPWQLRAAALDRKLTPLEWSAVLLHLIKHRGYLSQRKNEGETADKELGALLKGVANNAHALQTGDFRTPAELALNKFEKESGHIRNQRGDYSHTFSRKDLQAELILLFEKQKEFGNPHVSGGLKEGIETLLMTQRPALSGDAVQKMLGHCTFEPAEPKAAKNTYTAERFIWLTKLNNLRILEQGSERPLTDTERATLMDEPYRKSKLTYAQARKLLGLEDTAFFKGLRYGKDNAEASTLMEMKAYHAISRALEKEGLKDKKSPLNLSSELQDEIGTAFSLFKTDEDITGRLKDRVQPEILEALLKHISFDKFVQISLKALRRIVPLMEQGKRYDEACAEIYGDHYGKKNTEEKIYLPPIPADEIRNPVVLRALSQARKVINGVVRRYGSPARIHIETAREVGKSFKDRKEIEKRQEENRKDREKAAAKFREYFPNFVGEPKSKDILKLRLYEQQHGKCLYSGKEINLVRLNEKGYVEIDHALPFSRTWDDSFNNKVLVLGSENQNKGNQTPYEYFNGKDNSREWQEFKARVETSRFPRSKKQRILLQKFDEDGFKECNLNDTRYVNRFLCQFVADHILLTGKGKRRVFASNGQITNLLRGFWGLRKVRAENDRHHALDAVVVACSTVAMQQKITRFVRYKEMNAFDGKTIDKETGKVLHQKTHFPQPWEFFAQEVMIRVFGKPDGKPEFEEADTPEKLRTLLAEKLSSRPEAVHEYVTPLFVSRAPNRKMSGAHKDTLRSAKRFVKHNEKISVKRVWLTEIKLADLENMVNYKNGREIELYEALKARLEAYGGNAKQAFDPKDNPFYKKGGQLVKAVRVEKTQESGVLLNKKNAYTIADNGDMVRVDVFCKVDKKGKNQYFIVPIYAWQVAENILPDIDCKGYRIDDSYTFCFSLHKYDLIAFQKDEKSKVEFAYYINCDSSNGRFYLAWHDKGSKEQQFRISTQNLVLIQKYQVNELGKEIRPCRLKKRPPVR

SEQ ID NO: 582 - protein, 1082 aa, Neisseria meningitidis
MAAFKPNPINYILGLDIGIASVGWAMVEIDEEENPIRLIDLGVRVFERAEVPKTGDSLAMARRLARSVRRLTRRRAHRLLRTRRLLKREGVLQAANFDENGLIKSLPNTLWQLRAAALDRKLTPLEWSAVLLHLIKHRGYLSQRKNEGETADKELGALLKGVAGNAHALQTGDFRTPAELALNKFEKESGHIRNQRGDYSHTFSRKDLQAELNLLFEKQKEFGNPHISDGLKEGIETLLMTQRPALSGDAVQKMLGHCTFEPTEPKAAKNTYTTERFIWLTKLNNLRILEQGSERPLTDTERATLMDEPYRKSKLTYAQARKLLELDDIAFFKGLRYGKDNAEASTLMEMKAYHAISRALEKEGLKDKKSPLNLSPELQDEIGTAFSLFKTDEDITGRLKDRIQPEILEALLKHINFDKFVQISLKALRRIVPLMEQGKRYDEACAEIYGDHYGKKNTEEKIDLPPIPADEIHNPVVLRALSQARKVINGVVRRYGSPARIHIETAREVGKSFKDRKEIEKRQEENRKDREKAAAKFREYFPNFVGEPKSKDILKLRLYEQQHGKCLYSGKEINLGRLNEKGYVEIDHALPFSRTWDDSFNNKVLVLGSENQNKGNQTPYEYFNGKDNSREWQEFKARVETSRFPRSKKQRILLQKFDEDGFKERNLNDTRYVNRFLCQFVADRMRLTGKGKKRVFASNGQITNLLRGFWGLRKVRAENDRHHALDAVVVACSTVAMQQKITRFVRYKEMNAFDGKTIDKETGEVLHQKTHFPQPWEFFAQEVMIRVFGKPDGKPEFEEADTPEKLRTLLTEKLSSRPEAVHEYVTPLFVSRAPNRKMSGQGHMETVKSAKRLDEGISVLRVPLTQLKLKDLEKMVNREREPKLYEALKARLEAHKDDPAKAFAEPFYKYDKAGNRTQQVKAMRVEQVQKTGVWVRNHNGIADNATMVRVDVFEKGDKYYLVPIYSWQVAKGILPDRAVVQGKDEEDWQLIDDSFNFKFSLHPNDLVEVITKKARMFGYFASCHRGTGNINIRIHDLDHKIGKNGILEGIGVKTALSFQKYQIDELGKEIRPCRLKKRPPVR

SEQ ID NO: 583 - protein, 1082 aa, Neisseria meningitidis
MAAFKPNPINYILGLDIGIASVGWAMVEIDEEENPIRLIDLSVRVFERAEVPKTGDSLAMARRLARSVRRLTRRRAHRLLRARRLLKREGVLQAADFDENGLIKSLPNTPWQLRAAALDRKLTPLEWSAVLLHLIKHRGYLSQRKNEGETADKELGALLKGVADNAHALQTGDFRTPAELALNKFEKESGHIRNQRGDYSHTFSRKDLQAELILLFEKQKEFGNPHVSGGLKEGIETLLMTQRPALSGDAVQKMLGHCTFEPAEPKAAKNTYTAERFVWLTKLNNLRILEQGSERPLTDTERATLMDEPYRKSKLTYAQARKLLGLEDTAFFKGLRYGKDNAEASTLMEMKAYHAISRALEKEGLKDKKSPLRLSPELQDEIGTAFSLFKTDEDITGRLKDRVQPEILEALLKHISFDKFVQISLKALRRIVPLMEQGKRYDEACAEIYGDHYGKKNAEEKIYLPPIPADEIRNPVVLRALSQARKVINGVVRRYGSPARIHIETAREVGKSFKDRKEIEKRQEENRKDREKAAAKFREYFPNFVGEPKSKDILKLRLYEQQHGKCLYSGKEINLGRLNEKGYVEIDHALPFSRTWDDSFNNKVLVLGSENQNKGNQTPYEYFNGKDNSREWQEFKARVETSRFPRSKKQRILLQKFDEDGFKERNLNDTRYVNRFLCQFVADRMRLTGKGKKRVFASNGQITNLLRGFWGLRKVRAENDRHHALDAVVVACSTVAMQQKITRFVRYKEMNAFDGKTIDKETGEVLHQKTHFPQPWEFFAQEVMIRVFGKPDGKPEFEEADTPEKLRTLLAEKLSSRPEAVHEYVTPLFVSRAPNRKMSGQGHMETVKSAKRLDEGVSVLRVPLTQLKLKDLEKMVNREREPKLYEALKARLEAHKDDPAKAFAEPFYKYDKAGNRTQQVKAVRVEQVQKTGVWVRNHNGIADNATMVRVDVFEKGDKYYLVPIYSWQVAKGILPDRAVVQGKDEEDWQLIDDSFNFKFSLHPNDLVEVITKKARMFGYFASCHRGTGNINIRIHDLDHKIGKNGILEGIGVKTALSFQKYQIDELGKEIRPCRLKKRPPVR

SEQ ID NO: 584 - protein, 1082 aa, Neisseria meningitidis
MAAFKPNSINYILGLDIGIASVGWAMVEIDEEENPIRLIDLGVRVFERAEVPKTGDSLAMARRLARSVRRLTRRRAHRLLRTRRLLKREGVLQAANFDENGLIKSLPNTPWQLRAAALDRKLTPLEWSAVLLHLIKHRGYLSQRKNEGETADKELGALLKGVAGNAHALQTGDFRTPAELALNKFEKESGHIRNQRSDYSHTFSRKDLQAELILLFEKQKEFGNPHVSGGLKEGIETLLMTQRPALSGDAVQKMLGHCTFEPAEPKAAKNTYTAERFIWLTKLNNLRILEQGSERPLTDTERATLMDEPYRKSKLTYAQARKLLGLEDTAFFKGLRYGKDNAEASTLMEMKAYHAISRALEKEGLKDKKSPLNLSPELQDEIGTAFSLFKTDEDITGRLKDRIQPEILEALLKHISFDKFVQISLKALRRIVPLMEQGKRYDEACAEIYGDHYGKKNTEEKIYLPPIPADEIRNPVVLRALSQARKVINGVVRRYGSPARIHIETAREVGKSFKDRKEIEKRQEENRKDREKAAAKFREYFPNFVGEPKSKDILKLRLYEQQHGKCLYSGKEINLGRLNEKGYVEIDHALPFSRTWDDSFNNKVLVLGSENQNKGNQTPYEYFNGKDNSREWQEFKARVETSRFPRSKKQRILLQKFDEDGFKERNLNDTRYVNRFLCQFVADRMRLTGKGKKRVFASNGQITNLLRGFWGLRKVRAENDRHHALDAVVVACSTVAMQQKITRFVRYKEMNAFDGKTIDKETGEVLHQKTHFPQPWEFFAQEVMIRVFGKPDGKPEFEEADTLEKLRTLLAEKLSSRPEAVHEYVTPLFVSRAPNRKMSGQGHMETVKSAKRLDEGVSVLRVPLTQLKLKDLEKMVNREREPKLYEALKARLEAHKDDPAKAFAEPFYKYDKAGNRTQQVKAVRVEQVQKTGVWVRNHNGIADNATMVRVDVFEKGDKYYLVPIYSWQVAKGILPDRAVVQGKDEEDWQLIDDSFNFKFSLHPNDLVEVITKKARMFGYFASCHRGTGNINIRIHDLDHKIGKNGILEGIGVKTALSFQKYQIDELGKEIRPCRLKKRPPVR

SEQ ID NO: 585 - protein, 67 aa, Neisseria meningitidis
MFGYFASCHRGTGNINIRIHDLDHKIGKNGILEGIGVKTALSFQKYQIDELGKEIRPCRLKKRPPVR

SEQ ID NO: 586 - protein, 220 aa, Neisseria mucosa
MRHIFSDGLKEGIETLLMTQRPALSGDAVQKMLGHCTFEPTEPKAAKNTYTAERFIWLTKLNNLRILEQGSERPLTNTERATLMDEPYRKSKLTYAQARKLLGLKDTAFFKGLRYGKDNAEASTLMEMKAYHAISRALEKEGLKDKKSPLNLSPELQDEIGTAFSLFKTDEDITGRLKTELTPASNKTLSRPFTVKSASNGSTSAPWLPSTKWFLHFKPA

SEQ ID NO: 587 - protein, 392 aa, Neisseria sp.
MAPFTLKPLNYILGLDIGIASVGWAVVETDSDVLPYRLIDVGVRTFDRAEVPKTGESPAAARRLARSVRRMIRRRAHRMLRARRLLKREGMLQAADFDAHGLVENLPVNPWQLRVDALSRKLMPLEWAAVLLHMVKHRGYLSQRKNERNSSDKELGALLSGVAANSEALQGGDFRTPAELAVNKFEKESGHIRNQRGDYSHTFNRKDVQAELVLLFEKQKEYGNPYISDGLLTGVEDLLMTQRAALSGDAVQKMLGRCTFEPEEYKAAKNTYSAERFVWLTKLNNLRILDQGSERPLTDSERAKLMDEPYKKTKLTYAQVRRLLELDDTAFFKGLRYSKDNAESATLMEMKAYHSISGALEKAGLKNKKIAAGLIARIAGRNRRGVFAIQNR

SEQ ID NO: 588 - protein, 701 aa, Neisseria sp.
MQDEIGEAFSLFKTDEDIRGRLKGKLPDEQLDALLEYVSFDKFVQLSLKALRKILPLMEQGKRYDEACAEIYGDHYGIKDDKQAQFLPPVSADEIRNPVVLRALSQARKVVNAVVRRYGSPARVHIETAREVGKSFLDRKKIEKRQEENRKDRERSIAKFREYFPNFVGEPKAKDILKMRLYEQQQGQCLYSGKAIDLRRLNEKGYVEIDHALPFSRTWDDSFNNKVLVLAGENQNKRNQTPFEWLGGDEKRWREFTARVEHCRFPRSKKQRILMQKLDEKDFKERNLNDTRYVNRFLCNFIAQNMLLTGEDKNRVFASNGQITNLLRGMWGLKKVRESNDRHHALDAVVVACSTVAMQQKITNYVRQKEMNVFDGEMVDKTTGEVSRLHFPQPWDFFRQEVMMRVFGKPDTPSENNEEADTPEKLRALLADKLSSRPEAVHEAVTPLFVSRAPSRKMSGQGHMETIKSAKRLSEGKSVLRVPLTQLTPKLLENMVNREREPQLYEDLLGRLNAHGGDPAKAFAAPFFKRDKAGNPTQQVKAVRVEDVQKSGVIVREGNGVADNATMVRVDVFEKGGKYYLMPIYTWQAAKGILPNKAVIAHTDEANWQEMDTSFTFKFALYPNDLVLASLKKETYFGYFAGLDRSTGNISLRVHDLEKSKGKDGVYRIGVKTALSFQKYQVDELGKTIRPCRLKKRPPVR

SEQ ID NO: 589 - protein, 1089 aa, Neisseria sp.
MTAFKPNPLNYILGLDIGIASVGWAMVEIDDKENPVRLIDLGVRVFERAEMPKTGDSLAAARRLARSVRRLTRRRAHRLLRARRLLKHEGVLKPEDFDENGLVKPLPYIPKQPRNTPWQLRAAALDRKLTPLEWAAVLLHLVKHRGYLSQRKNEGETDDKELGALLKGVADNTHALQAGNFRTPAELALNKFEKESGHIRNQRGDYSHTFSRKDLQAELVLLFEKQKEFGNPYVSDDLKNGIENLLMTQRPALSGDAIQKMLGHCTFEPAEPKAAKNTYTAERFIWLTKLNNLRILNQGNERPLTDAERTTLMDEPYKKSKLTYAQARKLLDLDDTAFFKGLRYGKDNAESATLMEMKAYHAISRALEKEGLKDKKSPLSLSPELQDEIGTAFSLFKTDEEITGRLKGCLQPEILDALLKHISFDKFVQISLKALRRIVPLMEQGKRYDEACAEIYGDHHGRRNSEETLYLPPIPADEIRNPVVLRALSQARKVINGVGRRYGSPARIHIETAREVGKSFKDRKEIEKRQEENRKDREKAAAEFQEYFPNFVGEPKSKDILKLRLYRQQNCKCLYSGKEINLGRLNEKGYVEIDHALPFSRTWDDSFNNKVLVLGSENQNKGNRTPYEYLNGKDNSREWQEFKARVETSRFPHSKKQRILLQKFDEEGFKERNLNDTRYVNRFLCKFVADHMQLTGKGKRRVFASNGQITNLLRGFWGLRKVRAENDRHHALDAVVVACSTVAMQQRITRFVRYKEMNAFDGKTVDKETGEVLHQKTHFPQPWEFFAQEVMIRVFGKPDGKPELEEADTPEKLRALLAEKLSSRPEAVHEYVAPLFVSRAPNRKMSGQGHMETIKSPKRLDEGISVVRVPLTQLKLKDLEKMVNREREPKLYEALKARLEAHKDDPAKAFAEPFYKQDKAGNRTQQVKAVRIEQVQKTGVWVRNQNGIADNATMVRVDVFEKGGKYYLVPIYSWQVAKGILPDKAIIAFKDEEEWQLIDDSFNFKFPLHPNDLVEVITKKARIFGYFASCHRGTGNINIRIHDLDNKVGKNGILEGIGVKTALSFQKYQIDELGKEIRPCRLKKRPPVR

SEQ ID NO: 590 - protein, 1097 aa, Neisseria wadsworthii
MKKQPQRYILGLDLGIASVGWALILVDGAENPVGLLDCGVRTFERAEVPKTGDSLALARRQARSVRRLIRRRAHRLLRLRRLLKREGILSAADFNSDGLPNLPIDAWQLRVAGLERKLTNQEWAAVLLHLVKHRGYLSQRKSETQTENKELGRLLAGVAENSKLLSESSEQYRTPAELAVKLFAEQSGHLRNKGGEYTHTFNRLDLQKELHLLFERQYALGNPFASAELQSKVDELLMTQRSALQGEAVLKMLGKCTFEPSEYKAAKNTYSAERFIWLTKLNNLRILYNGEERALDEGDRKKLLDEPYKKAKLTYKQVRSILNLPESAVFKGLRYGKDSDGLKAENGTLMEMKAYHKIRTILDKAGLKGEWENRIRNPEILDKIGTAFSLYKTDEDIQAALADLRLPENVLDALLAGLNFDKFIQLSLKALRNILPLMERGIRYDEACKEVYGDHRALAESKNQVLLPPIPADEIRNPVVLRTLTQARKVINAIIRRYGSPQRVHIETARELGKSKQERDKIDRKNKENQNDRNRLASDIRKHFNFEPTPKDILKLRLYEQQHGKCLYSDLREEKGECLYTGNVIELHRLFEDGYVEIDHALPLSRTWDNSLNNKVLVLKSSNQNKGNKTPYEWLDGANNSRRWREFQARVQGCHFPYVKKQRIQTAKLDSKAEQGFLERNLNDTRYISKFMCQFITANLRLAETSNALMEEVAGENPYWKERKRQRVFAPSGSIIALLRGLWGLKKVREDNDRHHALDAIVVACSTVSMQQKITKAMQRRETLETVDSETGEVKTRIPQPWDFFRQEVMIRVFSDSPREELAEKLNSRPEALHDFVSPLFVSRAPNRKMTGQGHLETVKSAKRLSENISVVRKPLTALKLKDIENIVGYPDREPALYQALRERLLAHKDDPVKAFADKPFYKPAKDGGQGSLVKAVRIIENTKHGLKIRNGITDTNGDMVRTDVYQKTDKKGKRQYFIVPVYAWQVEKNELPTVDCKGYEIDDNYEFCFSLYKYDLIEIQNPNDINQELRAYYINCDSSDGRFWLAYHDKSAKEQQFRISTQNQPIIKKYQVDTLGKEIRLCKAEKRTALNGKKKK

SEQ ID NO: 591 - protein, 1426 aa, Niabella soli
MPRKNILGLDLGTTSIGFAKIIEDDDYQCSSVELIGVRVNPLTTDEQTNFEKGKPVSVNADRTLKRGMRRNLDRYQLRRDYLIEILRTHHIITADTKLAEDGKNTTHTTYALRALAATAEIPLEAFVRVLLAINKKRGYKSSRKAKNEDEGQLIDGMAIARRLYEESLTPGQFSYQLLKEGKKYLPDFYRSDLNTELNKVWNFQKQFYPEILTDEFKRHLEGKGQRATAVAFWGQHGFSMAENKGSREEKKLHAYKWRSEAAHKQLTKEEVAFVITEINNDLNKSSGYLGAISDRSKELFFNKQTVGQYLHQQLKENPHTRLKGQVFYRQDYLDEFETIWEMQAKFYSALTLELKEEVRDVVIFYQRKLKSQMGLISLCEFESKEIEIEKNGEKAKKRIGLRVAPKSSPLFQEFKIWQVLNNLEFRNKKTKEVFVPEMAAKQQLFDELNIKGNLLASEAIKILGYKTKDWEANYHTLEGNRTNKSLYDAWLKILELEGYDENLLKLSGSDDIDVSKIEKPALEIRQMVLAVFEVLGISGAILDFDAEADGKAFEQQPAYQLWHLLYSAEDDGKKYSQEDIFTYGHDNIGLKKKLCEKFGFRPEHTKILVNVVFSDDYGNLSSKAMRRIYPFIKELTYDKACAEAGYRHSAASLTKEEIAARPLQNRLDLLKKNELRSPVVEKILNQMVNVVNTLVDDENQNRKARGLSEDFHFDEIRIELARELKKNAKERAEMTTNINTAKQSHEKIIRILQTEFGVPNPSRNDIVRYKLYEELKNNGYKDLYTNTYISRDILFSKQIDVDHIIPQMSLFDDSFSNKTVVFRKDNQDKGNKTAYDYILGKYGEQALEEYISRITSLFELGKKNKEEGIGKAKFQKLQKRLVDIGDGFIERDLRESQYIAKKANNMLYAICRSVVSTSGEITARLREDWDLVNVMQEINLPKFRALGLTEMVEKKDGAQKERITDWTKRNDHRHHAMDALAIAFTRHSHIQYLNHLNARKDEANKWHPVVSKIEEKETVLIYDDLGNRKRKFKAPMPNFREVVKEHLENVLISHKAKNKVVTKNKNKIKTVRGEKVKTELTPRGQLHKETIYGRYRYYESKEEKIGPKFDAEMIGMVTNPQYKKLLLERLAANGNDPKKAFWGKNALNKNPLYVDEARQELLPEKILLRWLNDDYSIRKDVTPENLKDIKTIEKILDKGVKKILLKRLADFGNDPKKAFSDLDKNPIWQNEAKRIAIKRVTISGIKNAAPLHHKKDHLGNDILDEKGKQIPSSFVSTGNNHHVAIYRDAEGNLQERVVSLFDAVQLVNGGEPVIDKEYNKGIGWQFLFTMKQNEMFVFPDEKTGFNPREVDLLSSGNRKLISPNLFRVQKLASKNYFFRHHLETSVEEKKELKNIAYKPQLGLNALSNIVKVRINHIGEIVSVGEY

SEQ ID NO: 592 - protein, 79 aa, Nitritalea halalkaliphila
MPLRLPERVYKMISSTGAECHFLPVNVSSLIKGYDAKSKLGEFGSQNKQEVTSDSFIRVKERCYKLEINRLGIPLNRLK

SEQ ID NO: 593 - protein, 1498 aa, Odoribacter laneus
METTLGIDLGTNSIGLALVDQEEHQILYSGVRIFPEGINKDTIGLGEKEESRNATRRAKRQMRRQYFRKKLRKAKLLELLIAYDMCPLKPEDVRRWKNWDKQQKSTVRQFPDTPAFREWLKQNPYELRKQAVTEDVTRPELGRILYQMIQRRGFLSSRKGKEEGKIFTGKDRMVGIDETRKNLQKQTLGAYLYDIAPKNGEKYRFRTERVRARYTLRDMYIREFEIIWQRQAGHLGLAHEQATRKKNIFLEGSATNVRNSKLITHLQAKYGRGHVLIEDTRITVTFQLPLKEVLGGKIEIEEEQLKFKSNESVLFWQRPLRSQKSLLSKCVFEGRNFYDPVHQKWIIAGPTPAPLSHPEFEEFRAYQFINNIIYGKNEHLTAIQREAVFELMCTESKDFNFEKIPKHLKLFEKFNFDDTTKVPACTTISQLRKLFPHPVWEEKREEIWHCFYFYDDNTLLFEKLQKDYALQTNDLEKIKKIRLSESYGNVSLKAIRRINPYLKKGYAYSTAVLLGGIRNSFGKRFEYFKEYEPEIEKAVCRILKEKNAEGEVIRKIKDYLVHNRFGFAKNDRAFQKLYHHSQAITTQAQKERLPETGNLRNPIVQQGLNELRRTVNKLLATCREKYGPSFKFDHIHVEMGRELRSSKTEREKQSRQIRENEKKNEAAKVKLAEYGLKAYRDNIQKYLLYKEIEEKGGTVCCPYTGKTLNISHTLGSDNSVQIEHIIPYSISLDDSLANKTLCDATFNREKGELTPYDFYQKDPSPEKWGASSWEEIEDRAFRLLPYAKAQRFIRRKPQESNEFISRQLNDTRYISKKAVEYLSAICSDVKAFPGQLTAELRHLWGLNNILQSAPDITFPLPVSATENHREYYVITNEQNEVIRLFPKQGETPRTEKGELLLTGEVERKVFRCKGMQEFQTDVSDGKYWRRIKLSSSVTWSPLFAPKPISADGQIVLKGRIEKGVFVCNQLKQKLKTGLPDGSYWISLPVISQTFKEGESVNNSKLTSQQVQLFGRVREGIFRCHNYQCPASGADGNFWCTLDTDTAQPAFTPIKNAPPGVGGGQIILTGDVDDKGIFHADDDLHYELPASLPKGKYYGIFTVESCDPTLIPIELSAPKTSKGENLIEGNIWVDEHTGEVRFDPKKNREDQRHHAIDAIVIALSSQSLFQRLSTYNARRENKKRGLDSTEHFPSPWPGFAQDVRQSVVPLLVSYKQNPKTLCKISKTLYKDGKKIHSCGNAVRGQLHKETVYGQRTAPGATEKSYHIRKDIRELKTSKHIGKVVDITIRQMLLKHLQENYHIDITQEFNIPSNAFFKEGVYRIFLPNKHGEPVPIKKIRMKEELGNAERLKDNINQYVNPRNNHHVMIYQDADGNLKEEIVSFWSVIERQNQGQPIYQLPREGRNIVSILQINDTFLIGLKEEEPEVYRNDLSTLSKHLYRVQKLSGMYYTFRHHLASTLNNEREEFRIQSLEAWKRANPVKVQIDEIGRITFLNGPLC

SEQ ID NO: 594 - protein, 1389 aa, Oenococcus kitaharae; identical to SEQ ID NO: 251

SEQ ID NO: 595 - protein, 1535 aa, Ornithobacterium rhinotracheale
MNTILGLDLGTNSIGWALIKVLNDKTRLPLEIIDLGVVVIPTDQRTLDKFSKGESISKTAERTKQKGVRKLYERKKLRRERLHRVLNILGFLPEHYSKKIDFKKHLGQFFGNSQPKISYVENDHGKHEFIFMDSYREMLKEFSKHNIKNVPYDWTIYYLRKKALSQKISKEELAWVILNFNKKRGYYQFRDDNADENKENKIEKYYALKVTNVKKEDAQNYTITLENGWIYKNKSKISLLDWVGSTKEFISTEKFDNKGNIIKKKNGEDDRTLKLVDSEKDWIAIKKSTEDRIENYGKTVGTYLYEHLLKDPNQKLNGELINIIDRKFYKNELKQILEKQKEFHPELLNEDLFQKSIIELYPKNSTRQKELKNKDLCYLLIDDVIYYQRDLKKKNSTINKCSFESREYYLNGEKQIQKINCIAKSKPLYQEFRTLQFIKNLKVYEIIDGLEKDITSKLLPDFETKEHFFEWLNDKEKIDQLQLLSYKCFDLHDNVKNDLIAKGIKRPTEKAIRTELLEKYRWNYSKDNDRNFLLNETRFKILKYLKKVDKKLTLTNEQIESLWLLLYSAKDERELKNGLQKFSEKNKLPKKFSDIFISFPPFKKEYGAYSEKALKKLLSLVRFGKYWSFNKIDNNIQNKIMNILNGEVDDSISDRVREKTILLQDKNDFQDLPLWLASYVAYNRFSEVSEIKYWDSPDKIEFLKQHSIGNPIVEKIINETLKLIKDIWVIHGKSCKNFFSEIHIELSREIKSSSKKRAQITNNNTKNQKLNNLIKSLLIEMASDTKYENVTPYSPSQQEILKIYDEGIYSKEENSEKIKEINKIRNNNKISKSDITKYKLWLEQGYISPYTGKIIPLTKLFTAKYQKEHIIPQTKFFDDSFNNKVICEAEVNKLKDNSLAMNFIKAKGGKAVKLSDGETVTILNQEEYKQLVRTSFKKNSIKLRNLLLEEIPDTFTKRQLNDTKYISKLVLSLLSNIVREKGELESTAKRIVSTNGQITSILRNDWGLNNIWNKLITPRFERLNNINKNKIYGNWENKKGKNVFQINYLNDNLSTLNTKRIDHRHHALDALIVACTTRNHINFLNNQYAKSRNQRHDLRAKLKRRETITTEGSKKQVFKDFIKPWESFTQDALKKLETTIVNFKVNKRIINKTINWYKKWEKQKDGTYKKIQKKQTKGDAWAIRKPLHIDTIYGIVCKKLPLKSALENYKNIIDENLKHKIKELKEVNKFDNNQIINFFKECNFIFEDNNIQKVEVYDFKDNRDKTILSSSRQLIDESFTPKKIGKVLDPTIRNILLKHLNSTKYNNKFDSDGNPIKPEKLAFSPEGLKDLNKNIKHLNNNKEHQPIKRVKLFETLGNKIKVGYTQQKNKKFAETATGTNLFLGIYSDNNKRDFKTIPLILAIQREKEGLNPCPDTDEKGNQLLFSLSPNELVFVPNNEERKNPNLVDFENLSKDQIDRIYKFVSCTGSEAYFVPSRTAKPIIENENGTNNKSQRIIEFNEKTSIKNEKNEPVLIKTICWKIEVNRLGKIIKVIK

SEQ ID NO: 596 - protein, 103 aa, Parabacteroides merdae
MIVYRLFYRFLFKATKLVNFVIHKELKRQIARTGKIKFHSGGCGCQSGNYKMQNFEKGKSITTNADRTLKRSMRRNLYRCKLRRDVLIELLKKVGFIPEKQWK

SEQ ID NO: 597 - protein, 82 aa, Parabacteroides merdae
MSIWKLQYPPLDLKIYNKFLVYSRVNPLTVDEMQNFEKGKSITTNADRTLKRSMRRNLQRYKLRRDVLIELLKKVGFMSEKQ

SEQ ID NO: 598 - protein, 84 aa, Parabacteroides merdae
MSIWKLQYPPLDLKIYNKFLVYSRVNPLTVDEMQNFEKGKSITTNADRTLKRSMRRNLYRCKLRRDVLIELLKKVGFIPEKQWK

SEQ ID NO: 599 - protein, 398 aa, Pasteurella bettyae
MLANENQNKGNLTPYEWLDGKNNSKRWQDFVARVQTCCFSHRKKQHILSHKLDEKSFIERNLNDTRYVARFLCNFIADNMLLTGKGKRKVFASNGQITALLRGRWGLQKVRDDNDRHHALDAVVIACSTVAMQQKITRFVKYEEGNVFSGERIDRETGEIIPLYFPTPWKFFKENVEIRIFSENPKLELENRLPDYPQYNHEFVQPLFVSRMPTRKMTGQGHMETIKSAKRLDEGISVLKVPLTQLKLADLENMVNRERELALYEALKERLELFGNDPAKAFIEPFYKKGGALVKAVRVKKVQKSGVLVRDGNGVADNALMVRVDVFTKGGKYFLVPIYTWQVAKGILPNKAVTANIDEIDWLEMDESYQFIFTMYPNDLVKVKLKKEEFFGYYGGLD

SEQ ID NO: 600 - protein, 610 aa, Pasteurella bettyae
MNMLKPLNYILGLDLGIGSVGWAVVEIDEQGNPLRLIDVGVRTFERAEVAKTGESLALARRLARSSRRLVKRRAARIKKAKRLLKAENILLSVDEILPNDVWQLRVKGLDHKLERQEWAAVLLHLLKRRGYLSQRKNESKSENKELGALLSGVVTNHQILQTDEYRTPAEIAVHKFQAEDGHIRNQRGDYTHTFSRLDLLAEMELLFQRQTELGNLHTSSKLLENLTALLMWQKPALAGEAILKMLGKCTFEPTEYKAAKNSYSAERFVWLTKLNNLRILEQGAERALTDSERFVLLDQPYEKAKLTYAQVRTLLKLSDEAIFKGVRYQGEDKKTVESKTTLMEMKAYHQIRKALDGADLKDEWNTLKNDSALLDEIGTAFSLYKTDDDISHYLGGKLSEKVLNVLLENLNFDKFIQLSLKALQKILPLMLQGQRYDEAVSAVYGDHYGKKSAESCRLLPAIPANEIHNPVVLRTLTQARKVINAVVRLYGSPARIHIETGRKVGKSYQDRKKLEKQQEENREQRESAVKKFKEYFPNFVGEPKGKDILKLRLYELQQSKCLYSGKSFDPNRLLEKGYVEVDHALPFSRTWDDSFNNKVCLPMKTRIKAI

SEQ ID NO: 601 - protein, 199 aa, Pasteurella multocida
MACATPSMQQKITRFIRFKEVHPYKIENRYEMVDQESGEIISPHFPEPWAYFRQEVNIRVFDNHPDTVLKEMLPDRPQANHQFVQPLFVSRAPTRKMSGQGHMETIKSAKRLAEGISVLRIPLTQLKPNLLENMVNKEREPALYAGLKARLAEFNQDPAKAFTTPFYKQGGQQVKAIRVEQVQKSGVLVRENNGVADNA

SEQ ID NO: 602 - protein, 63 aa, Pasteurella multocida
MQTTNLSYILGLDLGIASVGWAVVEINENEDPIGLIDVGVRIFERAEVPKTGESLALSRRLAR

SEQ ID NO: 603 - protein, 1058 aa, Pasteurella multocida
MQTTNLSYILGLDLGIASVGWAVVEINENEDPIGLIDVGVRIFERAEVPKTGESLALSRRLARSTRRLIRRRAHRLLLAKRFLKREGILSTTDLEKGLPNQAWELRVAGLERRLSAIEWGAVLLHLIKHRGYLSKRKNESQTNNKELGALLSGVAQNHQLLQSDDYRTPAELALKKFAKEEGHIRNQRGAYTHTFNRLDLLAELNLLFAQQHQFGNPHCKEHIQQYMTELLMWQKPALSGEAILKMLGKCTHEKNEFKAAKHTYSAERFVWLTKLNNLRILEDGAERALNEEERQLLINHPYEKSKLTYAQVRKLLGLSEQAIFKHLRYSKESAESATFMELKAWHAIRKALENQGLKDTWQDLAKKPDLLDEIGTAFSLYKTDEDIQQYLEGKLPDSVINALLVSLNFDKFIELSLKSLRKILPLMEQGKRYDQACHEIYGHHYGEKNQQISQLLPVIPTQEIRNPVVLRTLSQARKVINAIIRQYGSPARVHIETGRELGKSFKERREIQKQQEDNRTKRESAVQKFKELFSDFSSEPKSKDILKFRLYEQQHGKCLYSGKEINIHRLNEKGYVEIDHALPFSRTWDDSFNNKVLVLASENQNKGNQTPYEWLQGKINSERWKNFVALVLGSQCSAAKKQRLLTQVIDDNKFIDRNLNDTRYIARFLSNYIQENLLLVGKNKKNVFTPNGQITALLRSRWGLIKVRENNDRHHALDAIVVACATPSMQQKITRFIRFKEVHPYKIENRYEMVDQESGEIISPHFPEPWAYFRQEVNIRVFDNHPDTVLKEMLPDRPQANHQFVQPLFVSRAPTRKMSGQGHMETIKSAKRLAEGISVLRIPLTQLKPNLLENMVNKEREPALYVGLKARLAEFNQDPAKAFATPFYKQGGQQVKAIRVELVQKSGVLVRQGNGVADNAPGSIVRTDVFIKNNKFFLVPIYTWQVAKGILPNKAIVAHKNEDEWEEMDEGAKFKFSIFPNDLIELRTKTECFLGYYIGPDRHNGSISLREHDSEISKGNAGVYRVGVKLALSLEKYHIDELGKNRRICRPHQRRPVR

SEQ ID NO: 604 - protein, 1056 aa, Pasteurella multocida
MQTTNLSYILGLDLGIASVGWAVVEINENEDPIGLIDVGVRIFERAEVPKTGESLALSRRLARSTRRLIRRRARRLLLAKRFLKREGILSTTDLEKGLPNQAWELRVAGLERRLSAIEWGAVLLHLIKHRGYLSKRKNESQTNNKELGALLSGVAQNHQLLQSDDYRTPAELALKKFAKEEGHIRNQRGAYTHTFNRLDLLAELNLLFAQQHQFGNPHCKEHIQQYMTELLMWQKPALSGEAILKMLGKCTHEKNEFKAAKHTYSAERFVWLTKLNNLRILEDGAERALNEEERQLLINHPYEKSKLTYAQVRKLLGLSEQAIFKHLRYSKENAESATFMELKAWHAIRKALENQGLKDTWQDLAKKPDLLDEIGTAFSLYKTDEDIQQYLTNKVPNSVINALLVFLNFDKFIELALKSLRKILPLMEQGKRYDQACREIYGHHYGEANQKTSQLLPAIPAQEIRNPVVLRTLSQARKVINAIIRQYGSPARVHIETGRELGKSFKERREIQKQQEDNRTKRESAVQKFKELFSDFSSEPKSKDILKFRLYEQQHGKCLYSGKEINIHRLNEKGYVEIDHALPFSRTWDDSFNNKVLVLASENQNKGNQTPYEWLQGKINSERWKNFVALVLGSQCSAAKKQRLLTQVIDDNKFIDRNLNDTRYIARFLSNYIQENLLLVGKNKKNVFTPNGQITALLRSRWGLIKIRENNDRHHALDAIVVACATPSMQQKITRFIRFKEVHPYKIENRYEMVDQESGEIISPHFPEPWAYFRQEVNIRVFDNHPDTVLKEMLPDRPQANHQFVQPLFVSRAPTRKMSGQGHMETIKSAKRLAEGISVLRIPLTQLKPNLLENMVNKEREPALYAGLKARLAEFNQDPAKAFTTPFYKQGGQQVKAIRVEQVQKSGVLVRENNGVADNASIVRTDVFIKNNKFFLVPIYTWQVAKGILPNKAIVAHKNEDEWEEMDEGAKFKFSLFPNDLVELKTKKEYFFGYYIGLDRATGNISLKEHDGEISKGKDGVYRVGVKLALSFEKYQVDELGKNRQICRPQQRQPVR

SEQ ID NO: 605 - protein, 134 aa, Pasteurella multocida
MVNKEREPALYAGLKARLAEFNQDPAKAFTTPFYKQGGQQVKAIRVEQVQKSGVLVRENNGVADNASIVRTDVFIKNNKFFLVPIYTWQVAKGILPNKAIVAHKNEDEWEEMDEGAKFKFSLFPNDLVELKTKK

SEQ ID NO: 606 - protein, 53 aa, Pasteurella multocida
YSKENAESATFMELKAWHAIRKALENQGLKDTWQDLAKKPDLLDEIGTAFSLL

SEQ ID NO: 607 - protein, 1366 aa, Pediococcus acidilactici
MGDRKYNLGLDIGTSSIGFAAVDENNQPIRVKGKTAIGVRLFEEGKTAADRRGFRTTRRRLSRRRWRINLLNEIFDAHLAEVDPTFLARLKESNRSNLDPKKSFQGSLLFPERKDYQFYEEYPTIYHLRKALMEEDRKFDIREIYLAVHHIIKYRGNFLNGTPMRSFKVENIELDTLFDQLNQLYAEIVPDNELAFDLAQVADVKDVLSSTTIYKMDKKKQLVKMMLLPASNKALQSENKKIVTQFVNAILNYKFKLDVLLQVETDADWSLKLNDEGADDKLEEFTGDLDENRLEIIDLLQRLHNWFSLNEITKDGNSLSAAMVEKYENHHHHLGLLKKVIENHPDAKKAKALKETYTAYVGKTDDKTQNQDDFYKAVEKNLDDSPDAKEIKRLIQLDQFMPKQRTGQNGAIPHQLHQQELDQIIEKQSKYYPFLAEPNPNVKRRKDAPYKLDELIAFKIPYYVGPLVTPEEQAQNKENVFAWMKRKAAGPITPWNFDEKVDRMESANRFIRRMTTKDTYLFGEDVLPAESMIYQKFVVLNELNNLKINGRHLSLKDKQDVYNDLFKQQKTVSIKALQNYYVTKKKAATAPTVGGLADPKKFLSSLSTYIDFKNMFGERVNDPQFQEDLEQIVEWSTIFEDRGIFKAKLQALGWLSEKQIQQLVAKRYKGWGRLSKKLLTGLKNAEGYSILDEMWRSTENFMQIQTRPEFAALIQQANEKQFEGNDPNNVWENIESILGDAYTSPQNKKAIRQVVKVVQDIEKAVGNPPEKIAIEFTREAAANPQRTQSRLRTLEKLYESAEEVVDAGLTAELAEFKENKHVLSDKYYLYFTQLGRDVYTGDTISLDKLNDYDVDHILPQSFIKDDSLDNRVLTIRAVNNGKSDNVPAKMFGKKMGSFWRYLLDNGMISKRKYNNLITDPDNISKYAQKGFINRQLVETSQVIKLTANILNGIYDKDTEIIEVPAKMNSQMRKMFDLVKVREVNDYHHAFDAYLTIFIGKYLYKCYPKLRPYFVYGKFKKFGDNEDIEVGDGRFNFLNRIERLKNVTDPETGEILWSNVAPNETIKQIKKVYNYKFMLVSRETTTRRAELFNQTVYPKNYRGKLIPIKEDRPTDLYGGYSGNTDAYLAIVALEDKKKGKYFKVVGIPTRAAAKLEKLKQQDSQQYLQALHKVIAPQFTKSTKKGIKKTEFEIVLDKVHYRQLVQDGPVKMMLGSSTYKYNAKQLVLSEKALQVIADDRKFDETQKDDNLIAVYDEILSIVNQSFDLYDINGFRKKLNDNRDQFIDLPAETKYEGRKVVAHGKREMILEILKGLHANAAFGNLKPIGFSTAFGQLQVPNGIILSKNAILIHQSPSGLFERKIKLSDL

SEQ ID NO: 608 - protein, 1229 aa, Pediococcus acidilactici; identical to SEQ ID NO: 140

SEQ ID NO: 609 - protein, 270 aa, Pediococcus lolii
LFNQTIYSAKASKTMIPIKNDRPTKLYGGYSGNEDAYMSIIRLSDKKKTYKVVGISMRDASKLKAYENNAHEEYLKKLKEVIEQQFLDSGKKTKADFEIVIPKVNYHQRMQDGTKQFRIGSSKYVHNTKQLVLSEKTLKAIRNNKQYNGDAEKDLINAFDEILTIVNDSFSIFDIRSFRKKLNESRDKFVSLPVEDTKEKSKVIKGKRETLKQILIALHANGTSQDIPQLGLKSFGKMVKTGGLTLSENTALIHQSPSGLFEHKIKLSDL

SEQ ID NO: 610 - protein, 1016 aa, Pediococcus lolii
MNGIFDAHLAEVDPTFLARLKESNRSNLDPKKSFQGSLLFPERKDYQFYKEYPTIYHLRKALMEKDRKFDIREIYLAVHHIIKYRGNFLNGTPMRSFKVENIELDTLFDRLNQLYEEIIPDNELAFDLEQVADVKEVLSSTTIYKMDKKKQLVKMMLLPASNKALQSENKKIVTQFVNAILNYKFKLDVLLQVETDADWSLKLNDEGADDKLEEFTGDLDENRLEIIDLLQRLHNWFSLNEITKDGNSLSAAMVEKYKDHRHHLELLKKVIEDHSDAKKAKALKETYTAYVGKTDDKTQNKDDFYKAVEKNLDDSPEAKEIKRLIQLDQFMPKQRTGQNGAIPHQLHQQELDQIIEKQSKYYPFLAEPNPNVKRRKDAPYKLDELIAFKIPYYVGPLVTPEEQAQNKENVFAWMKRKAAGPITPWNFDEKVDRMESANRFIRRMTTKDTYLFGEDVLPAESMIYEKFVVLNELNNLKINGRHLSLKDKQDIYNDLFKQQKTVSIKALQNYYVTKKKAATAPTVGGLADPKKFLSSLSTYIDFKNMFGERVNDPQFQEDLEQIVEWSTIFEDRGIFKAKLQALGWLSEKQIQQLVAKRYKGWGRLSKKLLTGLKNAEGYSILDEMWHSTENFMQIQTRPEFAALIQQANEKQFEGNDPDNVWENIENILGDAYTSPQNKKAIRQVVKVVQDIEKAVGNPPEKIAIEFTREAAANPQRTQSRLRTLEKLYESAEEVVDAGLTAELAEFKENKHVLSDKYYLYFTQLGRDVYTGDTISLDRLNDYDVDHILPQSFIKDDSLDNRVLTIRAVNNGKSDNVPAKMFGKKMGSFWRYLLDNGMISKRKYNNLITDPDNISKYAQKGFINRQLVETSQVIKLTANILNGIYDKDTEIIEVPAKMNSQMRKMFDLVKVREVNDYHHAFDAYLTIFIGNYLYKCYPKLRPYFVYDNFKKFGNKEDIGHKRFNFLGKIERDKKVVAPETGEILWSNVAPNETIKQIKKVYDYKFMLTSHETYTKHG

SEQ ID NO: 611 - protein, 1333 aa, Planococcus antarcticus
MKNYTIGLDIGVASVGWVCIDENYKILNYNNRHAFGVHEFESAESAAGRRLKRGMRRRYNRRKKRLQLLQSLFDSYITDSGFFSKTDSQHFWKNNNEFENRSLTEVLSSLRISSRKYPTIYHLRSDLIESNKKMDLRLVYLALHNLVKYRGHFLQEGNWSEAASAEGMDDQLLELVTRYAELENLSPLDLSESQWKAAETLLLNRNLTKTDQSKELTAMFGKEYEPFCKLVAGLGVSLHQLFPSSEQALAYKETKTKVQLSNENVEEVMELLLEEESALLEAVQPFYQQVVLYELLKGETYVAKAKVSAFKQYQKDMASLKNLLDKTFGEKVYRSYFISDKNSQREYQKSHKVEVLCKLDQFNKEAKFAETFYKDLKKLLEDKSKTSIGTTEKDEMLRIIKAIDSNQFLQKQKGIQNAAIPHQNSLYEAEKILRNQQAHYPFITTEWIEKVKQILAFRIPYYIGPLVKDTTQSPFSWVERKGDAPITPWNFDEQIDKAASAEAFISRMRKTCTYLKGQEVLPKSSLTYERFEVLNELNGIQLRTTGAESDFRHRLSYEMKCWIIDNVFKQYKTVSTKRLLQELKKSPYADELYDEHTGEIKEVFGTQKENAFATSLSGYISMKSILGAVVDDNPAMTEELIYWIAVFEDREILHLKIQEKYPSITDVQRQKLALVKLPGWGRFSRLLIDGLPLDEQGQSVLDHMEQYSSVFMEVLKNKGFGLEKKIQKMNQHQVDGTKKIRYEDIEELAGSPALKRGIWRSVKIVEELVSIFGEPANIVLEVAREDGEKKRTKSRKDQWEELTKTTLKNDPDLKSFIGEIKSQGDQRFNEQRFWLYVTQQGKCLYTGKALDIQNLSMYEVDHILPQNFVKDDSLDNLALVMPEANQRKNQVGQNKMPLEIIEANQQYAMRTLWERLHELKLISSGKLGRLKKPSFDEVDKDKFIARQLVETRQIIKHVRDLLDERFSKSDIHLVKAGIVSKFRRFSEIPKIRDYNNKHHAMDALFAAALIQSILGKYGKNFLAFDLSKKDRQKQWRSVKGSNKEFFLFKNFGNLRLQSPVTGEEVSGVEYMKHVYFELPWQTTKMTQTGDGMFYKESIFSPKVKQAKYVSPKTEKFVHDEVKNHSICLVEFTFMKKEKEVQETKFIDLKVIEHHQFLKEPESQLAKFLAEKETNSPIIHARIIRTIPKYQKIWIEHFPYYFISTRELHNARQFEISYELMEKVKQLSERSSVEELKIVFGLLIDQMNDNYPIYTKSSIQDRVQKFVDTQLYDFKSFEIGFEELKKAVAANAQRSDTFGSRISKKPKPEEVAIGYESITGLKYRKPRSVVGTKR

SEQ ID NO: 612 - protein, 211 aa, Porphyromonas catoniae
MGKKVLGLDLGVGSIGWCLITLDKDEKPQSILGMGSRIVPLSADDATEFTQGKAITKNKMRTVARTIRKGMDRYQLRREALKKVLREHAMLPDEALIKLPLLELWELRARAATPGEQVSLTELGRVLLHINQKRGYKHAKADEAAEAETKKGKETGYVAQVKGRYQILKEKGLTIGQHFAGELRANQQTAPRGTYYTYRIKEQVYPRVRGV

SEQ ID NO: 613 - protein, 1009 aa, Porphyromonas catoniae
MRIIREAYIEEYDRIMAVQRVFYPELLTDALIGRIRDRIIFYQRPLKSCKQLVSFCEFEKKEKVIRVKHTNKEGVQELVEKTITIGPKVAPKSSPIFQVCKVWESIHNIRLYHPDGTERKLEQEEKQKLFDYLQRNDKLSLTTLRKELKIKPKDKLWCDKLLEKGIAGNTTAAILRKAFKGYEHYERLFRFDLVRRDSHEADEDGVIRPIIDESYQNEPLYKLWHILYSIEDRAEMRSALIGQLGIKAEDLDNGLMDALYKIDFVKQGYGNKSAKFICKLLPHLQEGKMYSEAAEAAGMRHSDSMTAQERDERNLLEEIPLLQKNALRQPVVEKVLNQMINLVNALKREHGEIDEVRVELARELKMSREEREKATKNNSSREKENKAIAERITEYGLTPTKSRIQKYRLWQESAESCIYCGKRVDVVQFLRGEETEVEHIIPKSILFDDSLSNKACACRSCNQEKGNRFAMEYIQAKGWEQDYIERVDSLFHDKKISYSKRQHLLMLPKDLPEDFIERHLRLSQYISREAQGILRKGIRLVSASEGGVTAKLRQLWGYDNILRDLNLERYKSMGETEVVTVEHRDGQRTDERIKDWSKRKDHRHHAIDALVVACTRQSYIQRLNRVNAEADRQEMDAFIKEQQQEHKLSKKEKLSLLENWLKEQPHFTTGEVKEHAEGILISFRPGKRTVSRGRNIYKRSGKTDVQRNVLIPRGALSEETVYGVISVDGENKVVCKYPLQKFLDTKETNVDKIADQAAEKIVDKVLREKIRERIKRYGKKEAFAEPLYLDEAQTQVVRSVRCFISKDQAKLIPLRYNDESEAVGFVAPGNNHHLALYRDASGKMRASVVSFFAAVERARYGIPMIVLNPRETREKARIIPDLPESIFSKLPEEDWVLEETLQEGEMVLLGMENDAIEEAIKKKDYSKLSRYLYRVQSLSYNDYKFCFHLETESEKKEKKKGEDKKRGEKAKNTAVMPPKRYRIRCLATYQEDLNPRKVKIDLLGRISLA

SEQ ID NO: 614 - protein, 1197 aa, Porphyromonas sp.
MLMSKHVLGLDLGVGSIGWCLIALDAQGDPAEILGMGSRVVPLNNATKAIEAFNAGAAFTASQERTARRTMRRGFARYQLRRYRLRRELEKVGMLPDAALIQLPLLELWELRERAATAGRRLTLPELGRVLCHINQKRGYRHVKSDAAAIVGDEGEKKKDSNSAYLAGIRANDEKLQAEHKTVGQYFAEQLRQNQSESPTGGISYRIKDQIFSRQCYIDEYDQIMAVQRVHYPDILTDEFIRMLRDEVIFMQRPLKSCKHLVSLCEFEKQERVMRVQQDDGKGGWQLVERRVKFGPKVAPKSSPLFQLCCIYEAVNNIRLTRPNGSPCDITPEERAKIVAHLQSSASLSFAALKKLLKEKALIADQLTSKSGLKGNSTRVALASALQPYPQYHHLLDMELETRMMTVQLTDEETGEVTEREVAVVTDSYVRKPLYRLWHILYSIEEREAMRRALITQLGMKEEDLDGGLLDQLYRLDFVKPGYGNKSAKFICKLLPQLQQGLGYSEACAAVGYRHSNSPTSEEITERTLLEKIPLLQRNELRQPLVEKILNQMINLVNALKAEYGIDEVRVELARELKMSREERERMARNNKDREERNKGVAAKIRECGLYPTKPRIQKYMLWKEAGRQCLYCGRSIEEEQCLREGGMEVEHIIPKSVLYDDSYGNKTCACRRCNKEKGNRTALEYIRAKGREAEYMKRINDLLKEKKISYSKHQRLRWLKEDIPSDFLERQLRLTQYISRQAMAILQQGIRRVSASEGGVTARLRSLWGYGKILHTLNLDRYDSMGETERVSREGEATEELHITNWSKRMDHRHHAIDALVVACTRQSYIQRLNRLSSEFGREDKKKEDQEAQEQQATETGRLSNLERWLTQRPHFSVRTVSDKVAEILISYRPGQRVVTRGRNIYRKKMADGREVSCVQRGVLVPRGELMEASFYGKILSQGRVRIVKRYPLHDLKGEVVDPHLRELITTYNQELKSREKGAPIPPLCLDKDKKQEVRSVRCYAKTLSLDKAIPMCFDEKGEPTAFVKSASNHHLALYRTPKGKLVESIVTFWDAVDRARYGIPLVITHPREVMEQVLQRGDIPEQVLSLLPPSDWVFVDSLQQDEMVVIGLSDEELQRALEAQNYRKISEHLYRVQKMSSSYYVFRYHLETSVADDKNTSGRIPKFHRVQSLKAYEERNIRKVRVDLLGRISLL

SEQ ID NO: 615 - protein, 1422 aa, Prevotella denticola
MTQKVLGLDLGTNSIGSSVRNLDLSDDLKGQLEFFSSDIFRSSVNKESNGREYSLAAQRSAHSRSRGLNEARRRKLWATLDLLIKYGFCPMSPESLMRWRTYDKQRGLFREYPIDDKNFNAWILLDFDGDGKPDYSSPYQLRRELVIRQFDFDQPIERYKLGRALYHIAQHRGFKSSKGETLSQQETNSKQSLTDDTADVAGEMKASEEKLSKGLSTYMKENNLLTVGAAFAQLEDEGVRVRNNNDYRAIRSQFQREIETIFKFQQGLSVENELYERLVSEKKNIGTIFYKRPLRSQRGNVGKCTLERTKPRCAIGHPLFEKFRAWTLINNIKVRMSEEEQAEQLPMKLRFELYNDCFLAFVRAEFKFEDIRKYLEKRLGVHFSYNDKTINYKDSTSVAGCPITARFRKLLGEDWESFHVDGQKQRQAHGKNNASFHTVSYSTNDIWHFCYDAEEPEAVLSFAQDNLKWEKKKAEELVRIWSAIPQGYAMLSQKAIRNINKMLILGLKYSDAVLLAKVPEIVEITDGEILSVTEDYHRVEAQVGYEKQINNIVNALIAKYKSASEEYRFADHNYEYQLDKSDEKDIIKQIESNIGTRKWSLLDADEQTDILQKVRDKYQNFFRSHERKFVESPKLGECFEEYLMKKFPMVEGERWKKLYHPSQIAIYRPVPANKDRSALRLGNPDIGAIKNPTVLRVLNTLRKRVNQLLDDGIISPDETRVVVETARELNDANRKWALDTYNRIRHDENEKIKKILAEFYPKRDNISTVDIDKARYVIDQREMDYFTEAKTYHKDIKKYKLWLEQGGQCMYTGRTINLSNLFDPNSFDVEHTIPESISFDSSDMNLTLCDAHYNRFIKKNHIPADLPNYDKSVVIDGKEYSPIKPRLQRWADRVERLNRNVEYWRGQARRAQNKDRKDQCMREMHLWKMELEYWTKKLERFTITEVTDEFKNSQLVDTRVITRHAVLYLKSIFPHVDVQRGDVTAKFRKILGIQSVDEKKDRSLHSHHAIDATTLTIIPGAAKRERMLELFAKIEEVNKMLSFSGNEDRTGLKQELDGLKNQLNKEVKACRIGHNVSEIGTFINDNIIINHHVKNQALTPVRRRLRKRGHIVGGMDNPRWQTGDALRGEIHKASYYGAITQYAKDKEGKVLMKEGRPQINPTIKFVIRRELKYKKSSTDSGFASWDDLGKAIVDKELFALMKGQFPEGTSFKDACEQGIYMIKKGKNGEVDTKLYRIRHIRCKTKQKNALKIKEQAYKSEKEYKRYFYAAVGDLYAMCCYTNGKTREFKIYSLYDISCHRKVGVEDIPEFITDKKGNRLMLDYKLHTGDMILLYKENPEELYDLDNVSLSKLLYKINGFENDGLRIRMVNHLVAKEAMGESVKDYAKLPDIIRCGVKTIKFLVMGENRDFVIKNGKISFNHR

SEQ ID NO: 616 - protein, 443 aa, Prevotella disiens
MELDYWKGKYNRFTMTEIPEGFSRRQGMGIGLISRYAGLYLKTIFHKKDNPQKSNVYIVKGSITAEFRRIWNIQDDYEKKCRDNHIHHCIDAIVVGCIGKREYDLMAQFYRDEEKYRWEKKKKPFFKKPWETFTQDMLSLKDEVLTVHFNPSNFTKKAHKKVFTPKGIFVAQGDCARVKLHKESYFGAIEQKGEIKYVMRKELSALKIEDIKNIVDAVVKEKVLAVVKKKGFKQAMAEPIYMNEDKRILIKKVRLFVSQTNPLIVKKHRDLSSKEYKQNYYVDNEGNLMIAMYEGVKKNGKIDREITVVNNLEAAKFFRQSQKNNAEKQLISHLSPKNGYPLKTVLTQKQLVLMYEDSPKEIKLRDTKNMVKRLYQVVEIEKDGRVKLKFHQEARSEGLNKNSAAFKIQDTPESLYRHTKSNLKVLVNGVDFKINILGEISLI

SEQ ID NO: 617 - protein, 1375 aa, Prevotella histicola
MKKILGLDLGTTSIGWALVYESENTDEKSSIVRLGVRVNPLSVDEKGNFEKGKAITTNADRQQTHGARINLQRYKLRRENLKDCLQKQGWIGTEALCEEGKTSTFETYMLRAKAAEEEISLHELCRVLFMMNKKRGYKSNRKANNKEDGKLFDGMTVAKKLYEEHLTPAEYSFQLLSSGKKFKQEYYRSDLKEEFDRIWNEQQKYYPEILTDDFKQQLQGKSKGNTSKIFLGKYGIYSADLKGLDRKLQPLKWRVEALKQQVDKEVLAFVISDLNGQIASTSGLLGAISDRSKELYFNKQTVGQYLWTSLKETPHVSIKNKPFYRQDYLDEFEKIWETQATYHKELTPELKQEIRDIIIFYQRPLKSKKGLISVCELEQRKVKVTIDGKEKEISIGPKVAPKSSPMFQEFRIWQNLNNILLIDKGNNSIHPLYEEEKNLLYEELSVKEKLSKAEALKVLNKNSKQWDLNYKEIEGNRTQAVLYDCYNRIIVMTGHEEYNFKKLKASEIRSYVKTTFTGLGFNTDILEFDSSLTGHELEKQPMYQLWHLLYSYESDNSRTGNDALLRKLETAFGFPKEYAAVLSDVVFEDSYGNLSVKAMRKILPHLQAGLNYSQACEEAGYKHSRRSLTKNELDQKEYKEKLELLPKNSLHNPVVEKILNQMINVINAVIDEYGKPDEIRIELARELKIGAAERENMTRSINQGNAENKRIREILEKEFALSYISRNDIIKYKLYEELKSNGFKTLYSDTYISKDKLFSKDFDIEHIIPKARLFDDSLSNKTIEARDVNIAKSNKTAFDFISEKYDQQGIEAYKKKLDILLQDGSISKAKYNRLLMKEADIPSGFIDRDLRDTQYIAKKAYEILSDLVRNVTPTTGAVTSRLREDWQLVDVMKELNFEKYQKLGLVEVIEDRDGRKIKRIKDWTKRNDHRHHAMDALTIAFTKPSYIQYLNNLNARSDKNSSIYGIENKELHREDNKLRFNAPLPINEFRAEARRHLKSILVSVKAKNKVMTQNVNVIKTKHGVIKKVQLTPRGELHNATFYGTKKRPIIKMVKVGAALDEVTIKKVSSSFIREALLDRLHEYNGDAKKAFTGRNSIDKNPIYIDEEHKKTVPALVKTIEWEMYHPTRKLISPDLKIDKVIDKGIREILKTRLAKFNGDAQKAFSNLDENPIYKDEAKKITLKRVSLEGVSSVIPLHTLKDREGKLVVGKDGKPVLGDYVQTSNNHHIAFYMDENGNLQDNVVSFFEAAERKSQGVPVIDKNYNHDKGWNFLFTMKQNEYFVFPNEVTGFNPSEVDLMDEANYSIISPNLYRVQKMSKASGRDYWFRHHLEAMLNDDPKLRNSMFKRITSLKALEGIVKVRINCIGKIVAVGEYD

SEQ ID NO: 618 - protein, 1380 aa, Prevotella intermedia
MKRILGLDLGTTSIGWALVNEAENNNEASSIVRLGVRVNPLTVDEKSNFEKGKAITTNADRQLRHGARINLQRYKLRRQNLHDCLQKQGWLGTEAMYEEGKASTFETYKLRAKAAEEEISLHEFARVLFMLNKKRGYKSNRKANNKEDGQLFDGMTIAKKLYEEHLTPAEYSLQLLNKGKKFTQGYYRSDLNAELERIWDEQKKYYPEILTDEFKQQLEGKTKTNTSKIFLAKYGIYSADLKGLDRKFQPLKWRVEALQQQVDKEVLAFVISDLKGQIANTSGLLGAISDRSKELYFNKQTVGQYLWASLEENPHISIKNKPFYRQDYLDEFEKIWETQAAFHKQLTPELKQEIRDIIIFYQRPLKSKKSLISVCELEQRKVKATIDGKEKEITIGPKVAPKSSPVFQEFRIWQNLNNVLLIDNDTNEKRPLDEVERNLLYKELSIKAKLSKTEALKILNKKGKQWDLNYRELEGNRTQAILFDCYNRIITLTGHEECDFKKIKASEIRHYVSTIFKNLGFSTEILDFDPSLKKHELEKQPMYQLWHLLYSYESDNSRTGNESLLRKLETTFGFPEEYATVLCDVVFEEDYGNLSVKAMREILPYLQAGNDYSQACAYAGYNHSRHSLTKEELDQKVYKERLELLPKNSLRNPVVEKILNQMINVINAIIDEYGKPDEIRIEMARELKSSAADRKKTTHAISQGNAENQRIREILEKEFSLSYISRNDIIKYKLYEELEPNYYKTLYSDTYITKDKLFSKDFDIEHIIPKARLFDDSFSNKTLEARNINLEKSNKTAFDFIKEKYGEDGAEAYKKKLDMLLENDAISRPKYNNLLRAEADIPSDFINRDLRNTQYIAKKACEILGELVKTVTPTTGKITNRLREDWQLVDVMKELNFEKYEKLGLTEIVEDRDGRKIKRIKDWTKRNDHRHHAMDALAIAFTKPSFIQYLNNLNARSNKGDSIYAIENKELHYEEGKLRFNAPIPVNEFRAEAKRHLSAILVSIKAKNKVMTQNVNKIKTKHGIIKKIQLTPRGPLHNETIYGTKMRPIIKMVKVGAALDEATINKVSSPAIREALLKRLNEYSGNAKKAFTGKNTLEKNPIYLNAGRTKTVPSLVKTVEWESFHPTRKLIDKDLNVDKVVDKGIREILKARLEEFNGDAKKAFSNLEENPIYLDEAKKIALKRVSIEGVLSAIPLHTLKNQAGKPITGKDGKPVLGNYVQTSNNHHIAFYYDEDGNLQDNAVSFFEAAERKSQGIPVIDKDYNRDKGWRFLFTMKQNEYFVFPNEATGFIPSEVDLTDEANYGIISPNLYRVQKVSRIDKGTSASRDYWFRHHLETILNDDAKLKNLAFKRIRGLLELKDIIKVRINSTGKIVAVGEYD

SEQ ID NO: 619 - protein, 129 aa, Prevotella multiformis
MQKGGTGCKINRQTVGNVEVNVLNLRLYDRTDDREVTAGYLPTKEDYVRLFVYLNDRKEINQDTLLKDYFRLKKVKCGNEKEFAIRWNYIEDKEKKYPCNETRHELLAALDRAGMEHGWLDDSGTSARW

SEQ ID NO: 620 - protein, 535 aa, Prevotella multiformis
MVKGLLSNIVRTAEEREETSKFVISCTGRITDRLKQDWGLNDVWNSLVYTRFKRLNELTETEAFGHWQDKDRRVFQTSVPLELQRGFSKKRIDHRHHAMDALVIACASRNIIGYLNNESAESPEKREDLRRKLCDKNHIIRKPWESFTQDARAALEDIVVSFKNYVRIINKATNYYERYDADGRKTKAEQKGGEMWAVRKPMHEATYYGKVNLRRKERVSLKAALEDIPSICNRDLRDYINGLVEKHFNKEQVLAQFRSVGNRWNKQHIDKVDVWRFSDGKEEMVATRKPLDTSFDAKRIEAVTDTGIQRILSNYLEAKGGDPKIAFTPEGIADMNQHITAYNNGKQHKPILKVRVSTKLGKKYPVGQTGCKAGQFVVAEAGTNLYFAVYEDGEGNRSYDTIPLNEAVECLKQGLPPVPETREKGDRLKFYLSPNDLVYVPAGDEENEIDRERIYKFVDSSGTTANFIPHRTAGLIYNVDKKLAEALCNGSIIQNEYGVGSQQSKNQKALTGEMVKAVCWKLEVDRLGNILRIIK

SEQ ID NO: 621 - protein, 1380 aa, Prevotella nigrescens
MKRILGLDLGTTSIGWALVNEAESNNEASSIVRLGVRVNPLTVDEKSNFEKGKAITTNADRQLRHGARINLQRYKLRRQNLHDCLQKQGWLGTEAMYEEGKASTFETYKLRAKAAEEEISLHEFARVLFMLNKKRGYKSNRKANNKEDGQLFDGMTIAKKLYEEHLTPAEYSLQLLNKGKKFTQGYYRSDLNAELERIWDEQKKYYPEILTDEFKQQLEGKTKTNTSKIFLAKYGIYSADLKGLDRKLQPLKWRVEALKQQVDKEVLAFVISDLKGQIANTSGLLGAISDRSKELYFNKQTVGQYLWASLEENPHISIKNKPFYRQDYLDEFEKIWETQATFHKQLTPELKQEIRDIIIFYQRPLKSKKSLISVCELEQRKVKATIDGKEKEITIGPKVAPKSSPVFQEFRIWQNLNNVLLIDNDTNEKRPLDEDERYLLYKELSIKAKLSKTEALKILNKKGKQWDLNYKELEGNRTQAILFDCYNRIITLTGHEECDFKKIKASEIRHYVSTIFKNLGFSTEILDFDPSLEKHELEKQPMYQLWHLLYSYESDNSRTGNESLLRKLETTFGFPEEYATVLCDVVFEEDYGNLSVKAMRKILPYLQAGNDYSQACAYAGYNHSRHSLTKEELDQKVYKERLELLPKNSLRNPVVEKILNQMINVINAIIDEYGKPDEIRIEMARELKSSAADRKKTTHAINQGNDENQCIREILEKEFALSYISRNDIIKYKLYEELKPNGFKTLYSDTYIPKDKLFSKDFDIEHIIPKARLFDDSYSNKTLEARDINLAKSNKTAFDFVKEKYGEQGAEAYKKKLDMLLGNNVISKPKYNKLLMTEADIPSDFINRDLRNTQYIARKACEILGELVRTVTPTTGKITNRLREDWQLVDVMKELNFEKYEKLGLTEIVEDRDGRKIKRIKDWTKRNDHRHHAMDALAIAFTKPSYIQYLNNLNARSNKGDSIYAIENKELHYEEGKLRFNAPIPVNVFRAEAKRHLSAILVSIKAKNKVMTQNVNKIKTKHGIIKKIQLTPRGPLHNETIYGTKMRPIIKKVKVGAALDEATINKVSSPAIREVLLKRLNEYSGNAKKAFTGKNTLDKNPIYLNAERTKTVPASVKTVEWENYHPIRKPITPDLKVDKVIDKGIGEILKARLEEFNGDAKKAFSNLEENPIYLDQTKKIALKRVSIEGVLSTIPLHTLKNQAGKPIMGKDGKPVLGNYVQTSNNHHIAFYYDEDGNLQDNAVSFFEAAERKSQGISVIDKDYNRDKGWRFLFTMKQNEYFVFPNEATGFIPSEVDLTDEANYGIISPNLYRVQKMSRIEKGTSVSRDYWFRHHLETILNDDSRLKNSAFKRINSLKPLEGIIKVRINSIGKIVAVGEYD

SEQ ID NO: 622 - protein, 1506 aa, Prevotella nigrescens
MKTILGLDLGPNSIGWAKVEVDDEGNYLRNIKLGSRIIPMTQDMLGDFDKGVKVSQTAIRTDFRGNRRLIERHLLRRERLHRVLHALKFLPKHYEDAIGWDRNEPATYGKFVNNSEPKLAWERQEDGSMRFLFMESFNEMVADFAQNQPSLVSDGKKIPLDWTIYYLRKKALTRPIKKEELAWILLNFNQKRGYYQLRGEEEEDNLTKRKEYYKLKVVGVEADGAPKGGKTWYNIHLENGWTARCQSKIPLDDWVGKVKEYIVTTEYEDDGKTPKCDKEGKVKRSFKSPEKDDWQLIKTRTEKFIDDSNKTVGAFIYDYLLEKPFDKIRGKYIRTIERKYYKNELREILREQTKYHEGLHSLEALKICAEELYKNNQQHQEYLLKKDMTFLLLNDLIFYQRPLKSKKSLIADCPYEVYKYDDKLTGKKGQKKIKCIAKSNPYYQEFRLWQFIANLRLFSVTDGKEVTAEYLKTEEDYVRLFSFLNDRKDIKQETFLRSFLKLKKESIGSEKIYPIRWNYIEDANKSYPCNATRHELLLAFDRADIPRELLDVEEREYRLWHLLYSIEAKEETESALRKLKANKAFGDLNIDDAFVNSFLKIKPFEKEYGAYSEKAIKKLLAVMRRGSLWKEADICEATKQNIAKILQNDIDEKLKKKIEAAVSSFNKLSDFQGLPTWLACYVVYGRHSEAAQIQCWQSPEDLKTYINKFKQHSLRNPIVEQCLLETLRTVYDIWKDAGQIDEIHIELGRNMKSTAEQRARKTKDILRNENTNLRIKNLLVELKNDDKIENVRPYSPSQQEILRIYEEGALQELSKEDEMFEDISKISKMAQPSPTELSRYKLWLEQKYRSPYTGRVIPLSKLFTTAYQIEHIIPQSRYFDDSFNNKVICESEVNSLKDNMLGYEFIKECGGRIVHCTLLGDVKIFTKEEYKDFVTKHYIDNTYKRDKLLLEDIPQEFSARQLNDSRYISKMVQTVLSNIVRAENEQEATSKFVVSCNGAITNRLKKDWGLNDVWSSIVCPRFKRLNEITKTNAFGHWEDKAGKHVFQTTVPLELQRGFSKKRIDHRHHAMDALVIACASRNIVNYLNNESANSPEKREDLRKKLCDEKRKIRKPWKTFTQDAREALSDVVVSFKNYVRVINKATNYYEHYSSSGNKVMISQKGNDMWAIRKPLHKESVFGRVNLCRKVIVSLKKALENIPAICDKTLRDYINALVEKHFNTRQLLAHFKSINYRLNRQCVEKVEVWQFSDEKIEMVARRKSLDTSFDDKQISSITDTGIQKILLNYLQTKDGNAEIAFTPEGIEEMNKNISLYNDGKAHQPILKVRVATPKGMKYPVGQTGNKATKFVVAEKGTNLYFAIYENELGVRSYDTIPLNIVVERLKEGLSPVPQANEADIPLKFYLSPNDLVYVPTKENEDELCRDRIYKFVDSSGTTANFVPHTSANTIYNVDKEYAEKCCNGAVFLNEYGLGSPQSKNQRALTGEMIKEICWKLKVDRLGNIIKVIK

SEQ ID NO: 623 - protein, 774 aa, Prevotella oulorum
MEQCILETLRTVYDIWKEAGQIDEIHVELGREMKQTAEQRAHLTEKVLRNENTNLRIKSLLMELKNDADMKDVRPYSPMQQEILRIYEEGALQTLSKDDAAFTEIMKISKMAQPSASELQRYRLWLEQKYRSPYTGKPISLSKLFTSAYQIEHIIPKKRYFDDSFSNKVICEAEVNGKKDSMLAYEFIKDCGGDVIHCTTLGDVTILSEAEYKALVTELYANNKSKKDKLLMEDIPQDFINRQLNDSRYISRVVMTLLSNIVRIEGEEEATSKFVIPCSGGITDKLKKDWGLNDVWNNIVYPRFERLNALTNTSDFGQWENKEGKRVFQTSVPLELQRGYQKKRIDHRHHAMDALVIACASRKIINYLNNQEANDPTKQENARKQLCIKSRIIRKPWETFTQDAYKALDNIVVSFKNYVRVINKATNYYERYNADGKKAVDEQKGEAMWAIRKPMHKDTVFGHVNLRRKAVVKLKDALENIPAICDKTLRHYIQDLQKKHFNTKQLLAHFKSINYRLNKQAVDKVEVWQYSDDKEQLAATRKPLGPSFDAKCIAAITDTGIQKILLNYLQAKGGDPAIAFTPEGIAEMNQNIAVYNGGKQHQPILKVRIAKPMGKKFPIGQTGNKAFQYVIAEEGTNLYFAIYEDEEGNRTYDTIALREVVERLKQGLTPVPEKNEKGVALKFHLSPNDLVYVPTADELLSKVCSLDKNRIYKMVSATKSECLFIPHSVAKTIYDKVEFEALNKMGRALTGEMIKSVCWKIEVDRLGHIVNIIK

SEQ ID NO: 624 - protein, 691 aa, Prevotella oulorum
MKTILGLDLGTNSIGWAKVIVDDNENYLRDIQLGSRIIPMSQDVLGKFDKGVTESQTAIRTSFRGVRRLRERTLQRRERLHRVLHTLHYLPPHYDSAIGWDRKTPTTYGKFLNHGEPKLAWERREDGTMQFLFMDAFHEMIADFAKYQPALVADGKKVPLDWTIYYLRKKALTQPIKKEELAWILLNFNQKRGYYQLRGEEDEENAAKHEEYHELKVVGVEVDEAGKGDNTWYNVKLENGWTYHRQSKIPLDDWVGKVRAFIVTTEYEKDGTTPKKDKEGNVKRSFRSPDEKDWGLRKKQTEHSLEASGTPVGAFIYDHLLKEPSDKIRGKFIHTIERKYYKQELAAILREQSKHHEKLCSKDMLKACIEELYPNNPLHRESLLKKDMPYLLIEDLIFYQRPLKSKKSLIAECPYEAYSYVDKETGEMKRQGIKCIAKSNPYYQEFRLWQLIANLRLRNRSDERDVTAEYLPHQEDYVRLFTYLNDRKEINQETLLKDFFKLKKVTIGGEKVFPIRWDYIEDKEKKYPCNATRHELLLALDRAGIEHDWLNDRDLAYRLWHLLYSVDSKDETERALRKLKDDDAFVESFLKIKPFEKEYGAYSEKAIKKLLPVMRRGSLWNEADLCPSTKERIANILQGTIDEKLKKKIGAFISSCQQVSDFQGLPEWLACYVVYGRHSEATDIQRWETPE

SEQ ID NO: 625 - protein, 242 aa, Prevotella saccharolytica
MKLVLGLDLGVGSVGWALIFITDSGEPIKILALGERIVSMDSNNSNEFSAGATCTLNQKKTKAKSVRKGYSRYVQRRDALTAELRHIGMMPDETLIKLPVLDLWQLRANAATEGKKLSLAEIGRVLYHINQRRGYKHGKSDVSSDNKQKGYVKAVNERYCMIQERQQTIGQYFALKLKETAVTTEKGTFYTFRIKDQVFPREAYEEEFVVAYSTKVLKFKQITTLLNVVICLMMLLLIVQRY

SEQ ID NO: 626 - protein, 1174 aa, Prevotella sp.
MEFHPELCDAELLKACAEELYRNNEAHRAQLLAKDFKHLLVEDVLFYQRPLKSKKSLIANCPYETRQYINKETGEIKDVNVKCIAKSNPYFQEFRLWQWISNLRLLRQADGQDVTAAYIKGNEDKERLFDLLNNQGEIKQEHILRDFLKLKKPKGGEFPLRWNYVDDKIYPANETRHAINKAIKGMAVDKEEKETLGQLLDQPAVAYMLWNLLYSITDRNELARALRRFALTHGVSSVDAFVESFLKVKPFKKEYGAYSEKATKKLLQVMRLGKYWCGDELPEPAKRTKGNKQAVYDEMAHRGICKQTLQNISNIIEENIDERLMGALLNPERPLTELSHFQGLSVSDACYVVYGRHSEVAEIVKWKDADELNTFINNFKQHSMRNPIVEQCVLETLRTVRDVWEQEGQIDEIHVELGRNMKRTAEQRARDTQAIQRNENTNMRISLLLTELKNDPSISDVRPYSPSQRELLKIYEEGALENLTNQDEDIAKISRLAQPSASELRRYKLWLDQKYVSPYTGRPIPLAKLFTPAYEIEHIIPQSRYFDNSFSNKVICEAEVNKLKDNLLGMEFIKKFGGKTKGILDEEAYKLHVTTNYAHNPAKRSKLLMEDLPTDFNSRQLNDTRYISKTVMALLSNVVREEGERETRSKHVVVCTGGVTDTLKKDWGLHDVWHNLVYPRFIRLNNLTGSQNFGYWRYLNEENSKKGEDSKKVFQITLPPECQRGFVKKRIDHRHHAMDALVIACASANIVNYLNNQSAANPHIHENLQRLLCDRKREIRKPWPTFTQDAQAALKDLVVSFKNTVRVVNKASNTYLRYDKDGKKKRFKQEGEGLKAIRKPMHKETYYGEVNLIRKEMVPLKRALDDVNAIVDKELRASIKGLLRDGFNPQQVLANFKAKDFKFDKRDIKKVEVYVSSEKSTPMVATRKSLDTSFNAKRIADITDTGIQKILLNYLKANDNSPEQAFTPEGIAYLNEHIAEYNDGKPHQPILKVRVSEVKGAKFAVGQTGSKKDKFVEAQSGTNLYFAIYEDKEGKRHFETIALKVAAERLKDKQMPVPEINDAGLPLKFYLSPNDLVYVPTDEDRATAHPSIDKMRIYKMVSATDRQCFFLPFTVASVISNKVEFEALNKMERVLDASEYSSAYDSSHVNKVMVKNVCWKLEVDRLGNITKIVR

SEQ ID NO: 627 - protein, 992 aa, Prevotella sp.
MITRILGLDTGTNSLAWAVVDRDANGNYTLVKRGDVIFTEGVKIEKGIESSKAAERTAHKALRVHYSRRRLHKIDTLKVLVELNLCPCLSDEQLSQWKAKKTYPLTDDFMLWQRSGSAEENNPYYCRHRCLTQKLDLTDQSQRFLLGRAFYHLAQRRGFLSNRLDTSADSDESGKVKSGIAQLSVEMEKAGCEFLGEYFYQLYKQHGNTIKLRSRYTDREEHYKKEFLAICEKQELDPKWVEALQRAIYFQRPLKSQRKGVGKCTFEPKKPRCAESHPDYEAFRMLCFLNNVKIQTPNDTSLRPLNEDEREKIWPIFFRKSKPNFDFEDIAKALAGKNNYAWYKDAGEKPFKFNYRMQQGVSGCPVTAQLIDIFGSDWQTAIAETYTAVEKKNGTKTIDEMADDVWNVLYSFSSKDKLKAFATEKLQLDEASATKFANAKLPHGFASLSLKAIRNILPFLRQGFIYAHAVHLAKIPDIVTKAVWNDADKREMILSGLMEIIENYNPKDRGVEGTIDFCIKSHLQDVIDLRPGAADALYHPSMIETYPDAKLNKMGVFQLGSPRTNAIRNPMAMRSLHILRSVVNQLLRDGIIDRDTEVHVEYARELNDANKRKAIADYQREQEKKRKQYRDDIIALYKSECHKEIEPTDTDILKFQLWEEQNHLCLYTGTQIGICDFLGDNPKFDIEHTVPRSVGGDSTQMNLTLCDATFNRQVKGAQLPSQLSNHADILVRIDHWKSKCEDLRKQLDKIRTYGGMEKNMKDRLIQKRHRLKMDLDYWQGKYSRFTMTEVPEGFSRRQGAGIGLVSKYAGLFLKSLFHNEQNPNKSNVYVVKGVTTAEFRRMWGLQGEYEKKSRLNHCHHCIDAITIACIGKAEYDKMAQYYHDEELFQWRGTTTKPHFNKPWPTFTEDVLAIEQSLLVKHLTKDNMPKQAKKRVRTATGKYLAQGDTARGSLHKDTYYGAIEQNGEIRYVLRKPLNKFENEAELEKIVDQA

SEQ ID NO: 628 - protein, 1375 aa, Prevotella sp.
MKKILGLDLGTTSIGWALVNESENKDEQSSIVRLGVRVIPLTVDEKGNFEKGKAITTNADRQQVHAARINLQRYKLRRENLRDCLQKQGWIGSEPMCEDGKSSTFETYKLRAKAAVEEVSLHEFARVLFMLNKKRGYKSNRKANDKEEGKLFDGMTIAKKLYEEHLTPAEYSLQLLNTGRKFTPEYYRSDLIEEFEKIWNEQQKYYPEILTDEFKQQLEGKAKSNTSKLFLGKYGIYSADTKGLDRRLQPLKWRVEAMKQQVDKDVLAFVISDLKGQIANTSGLLGAISDRSKELYFSKQTIGQYLWASLQENPHISIKNQPFYRQDYLDEFEKIWETQATYHKELTSELKQEIRDIIIFYQRPLKSKKNLIAVCELEQRKVKVTVDGKEKEITIGPKIAPKSSPMFQEFRIWQNLNNILLLDHETNSKRPLYEEERNLLYEELSVKEKLSKTEALKVLGKKSKQWDLNYKELEGNRTQAVLYDCYNRIIVMSGHEECNFKKLKASDIRHYVKMIFKNLAFNTDILCFDSSLKGHELERQPMCQLWHLLYSYEGDNSRTGNDALLRKLETSFGFPKEYAAVLADVIFEDSYGNLSVKAMRNILPHLQAGKDYSQACEEAGYKHSRRSLTKEELNQKVYKEKLELLPKNSLHNPVVEKILNQMVNVINAVIEEYGKPDEIRIELARDLKIGAAERENMTRSINQGNAENKRIREILEKEFALSYLSRNDIIKYKLYEELKSNGFKTLYSDTYISKDKLFSKDFDIEHIIPKARLFDDSLSNKTIEARDVNIAKSNKTAFDFILERYGEQGVKTYKTKLLRLLEDGAISNKKYNNLLKTEADIPSGFIDRDLRNTQYIAKKAYEILSELVKIVTPTTGSVTNRLREDWQLVDVMKELNFEKYQKLGLADVIEDRDGRKVKRIKDWTKRNDHRHHAMDALTIAFTKPSYIQYLNNLNARSDKSSSIYGIEVKELHREEGKFRFNAPLPINEFRAEAKRHLKSVLVSIKAKKKVMTQNVNKIKTKHGIIKKVQLTPRGELHNATYYGTKKRPLVRMVKVGAALDEATIKRVCSPAIRAALLKRLNAYNGDAKEAFTGRNSIDKNPIYLDIEQTKLVPVLVKTIEWGMYHPIRKRITPDLKIDKVIDKGIREKLKARLAEFNGDAQKAFSNLDENPIYMDEAKRITLKRVSIEGVLSAIPLHTLKDKAGKPVIGSDGKPVFGDYVQTSNNHHIAFYIDDKGNLQDNPVSFFEAAERKSQGVPVIDRRYNCDKGWHFVFTMKQNEYFVFPNEATGFIPSEVDLLDEANYCIISPNLYRVQKLSKASGRDYWFRHHLETMLNDDLRLKNSTFKRIQSLKGLEDIVKVRINSIGKIVAVGKYD

SEQ ID NO: 629 - protein, 1483 aa, Prevotella sp.
MKTILGLDLGTNSIGWAKVSVDDYGNYLHDIKLGSRIIPMSQDVLGNFDSGVTVSQTAQRTEFRSKRRLVQRNLQRRERLHRVLHVLDFLPAHYDAAIGWDRTEAVTYGKFLNHAEPKLAWEELGNGKRRFLFMDSFHEMVADFARCQPALVADGKKIPLDWTIYYLRKKALTQAITKEELAWILLNFNQKRGYYQLRGEEEEENPTKQEEYYELKVVSVEATDSRKGNDTWYNVHLENGWIYRRSSKISLDDWVGKVKQFIVTTEYEKDGTTLKTDKEGNVKRSFRAPNENDWGLRKKRTETLLEMSGKTVGAFIYDHLLQEPADKIRGNFIRTIERHYYKAELEAILAEQCKYHIELRDKEMLEACARELYLNNLPHQRSLMKKDMTYLLLYDLIFYQRPLKSKKALIANCPYEYYEYVDKETGEIKRQNIKCIAKSNPYFQEFRLWQFVLNLRLFDRVEDKEVTANYLPTADDHARLFTYLNDRKEINQETLLKDYFKLKKVKIGNEKEYPIRWNYIEDKEKKYPCNETRYELLMALDRAGIEHKWLDDNNLEYRLWHLLYSVEVKSESETALRKLKNDDAFVNSFLKVKPFKKEYGAYSEKAIKRLLAVMRKGFLWNEQDICDETRKRIEIIIKGDVDEKVKERMGHAAYSFDRVSDFQGLPEWLACYVVYGRHSEAMDIQRWDSPERLMAYINNFKQYSLRNPIVEQCILETLRTVHDIWKETGQIDEIHVELGREMKSTSEERARRTQNVLRNENTNLRIKSLLIELKNDTDICNVHPYSPMQQEILRIYEEGALQELNREDEDFEEISKISQMSQPSGKELNRYKLWLEQKYRSPYTGKAISLAKLFTPAYQIEHVIPQSRYFDDSFTNKVICEAEVNTLKSNLLGYEFIKKHGGEIIHCTTLGDVRIFSESEYKAFVMDHYANNKSKKDKLLMEDIPQEFLSRQMNDSRYISKVVKTLLSNIVRMADESEATSKSVIVCTGGVTDRLKKDWGLNDVWNSIVYSRFERLNRLTGTEAFGHWENKDGKRVFQTSMPLELQRGFRKKRIDHRHHAMDALVIACASRNIVNYLNNESANNPKKREDLRRQLCDKNRVIRKPWETFTQDAYNALENVVVSFKNYVRVINKATNRYEHYDENGKKRFVQQKGSELWAIRKPMHKETYYGHVNLRRKELVTLQKALDDIPSICDKKLRDYISALVEKHFNKRQLLAHFKSTDYYWQKQYVNKVYVWTFSDDIKPLVATRKLLDTSFDAKRIGTITDTGIQKILRNYLEAKGGNATLAFTPEGIVEMNQNISKYNDGKPHQPILKVRITEPMGAKYRVGQTENKMAKYVEAQSGTNLYFAIYEDSEGKRSYTTVPLDEVAERLKQRLSPVPEKDENDVPLKFYLSPNDLVYVPTEEELQLRECKLNKDRIYKMVSSTGSECHFIPYYVANVIYNKVEFEAKNKIGRALTGEMIKAVCWKLEIDRLGNILKVIK

SEQ ID NO: 630 - protein, 593 aa, Prevotella sp.
MNTRILGLDTGTNSLAWAVVDRDAKGNYTLVRRGDVIFTEGVNVDGQPVPSKAAVKSKYKSLRVQYARRRLRKIDTLKVLVSLDLCPYLSDQQLSQWKAKKTYPLTDDFMLWQRSGSAEENNPYYCRYRCLTQKLDLTDQSQRFLLGRAFYHLAQRRGFLSNRLDTTSDSAESGKVKSGIAQLSVEMEKAGCTFLGEYFYQLYKQHGNTVRLRSRYTDREEHYIKEFLAICEKQELDAQWVEKLQRALYFQRPLKSQRKGVGKCTFEPKKPRCAESHPDYEAFRMLCILNNIKIKTPKDVSLRPLNAEEREKVWPLFFRKSKPNFDFEDIAKALAGKNNYAWYKDAGEKPFRFNYRMHQGVSGCPVTAQLIDIFGSDWKAGIAETYTAVGKKNGTKTIDEMADDVWNVLYSFSSKDKLKAFATDKLQLDEARATKFANAKLPHGFAALSLKAIRNILPFLRQGFIYAHAVLLAKIPDIVTAAVWDDADKREQILSGLLEVIENYNPDDRGIEGTIDFCIKSHLQDVVDLRPGAADALYHPSMIEAYPDAKLNKMGVFQLGSPRTNAIRNPMAMRSLHILRSVVNLLLRDGMLS

SEQ ID NO: 631 - protein, 1424 aa, Prevotella sp.
MTQKVLGLDLGTNSIGSAVRNLDLSDDLQWQLEFFSSDIFRSSVNKESNGREYSLAAQRSAHRRSRGLNEVRRRRLWATLNLLIKHGFCPMSSESLMRWCTYDKRKGLFREYPIDDKDFNAWILLDFNGDGRPDYSSPYQLRRELVTRQFDFEQPIERYKLGRALYHIAQHRGFKSSKGETLSQQETNSKPSSTDEIPDVAGAMKASEEKLSKGLSTYMKEHNLLTVGAAFAQLEDEGVRVRNNNDYRAIRSQFQHEIETIFKFQQGLSVESELYERLISEKKNVGTIFYKRPLRSQRGNVGKCTLERSKPRCAIGHPLFEKFRAWTLINNIKVRMSVDTLDEQLPMKLRLDLYNECFLAFVRTEFKFEDIRKYLEKRLGIHFSYNDKTINYKDSTSVAGCPITARFRKMLGEEWESFRVEGQKERQAHSKNNISFHRVSYSIEDIWHFCYDAEEPEAVLAFAQETLRLERKKAEELVRIWSAMPQGYAMLSQKAIRNINKILMLGLKYSDAVILAKVPELVDVSDEELLSIAKDYYLVEAQVNYDKRINSIVNGLIAKYKSVSEEYRFADHNYEYLLDESDEKDIIRQIENSLGARRWSLMDANEQTDILQKVRDRYQDFFRSHERKFVESPKLGESFENYLTKKFPMVEREQWKKLYHPSQITIYRPVSVGKDRSVLRLGNPDIGAIKNPTVLRVLNTLRRRVNQLLDDGVISPDETRVVVETARELNDANRKWALDTYNRIRHDENEKIKKILEEFYPKRDGISTDDIDKARYVIDQREVDYFTGSKTYNKDIKKYKFWLEQGGQCMYTGRTINLSNLFDPNAFDIEHTIPESLSFDSSDMNLTLCDAHYNRFIKKNHIPTDMPNYDKAITIDGKEYPAITSQLQRWVERVERLNRNVEYWKGQARRAQNKDRKDQCMREMHLWKMELEYWKKKLERFTVTEVTDGFKNSQLVDTRVITRHAVLYLKSIFPHVDVQRGDVTAKFRKILGIQSVDEKKDRSLHSHHAIDATTLTIIPVSAKRDRMLELFAKIEEINKMLSFSGSEDRTGLIQELEGLKNKLQMEVKVCRIGHNVSEIGTFINDNIIVNHHIKNQALTPVRRRLRKKGYIVGGVDNPRWQTGDALRGEIHKASYYGAITQFAKDDEGKVLMKEGRPQVNPTIKFVIRRELKYKKSAADSGFASWDDLGKAIVDKELFALMKGQFPAETSFKDACEQGIYMIKKGKNGMPDIKLHHIRHVRCEAPQSGLKIKEQTYKSEKEYKRYFYAAVGDLYAMCCYTNGKIREFRIYSLYDVSCHRKSDIEDIPEFITDKKGNRLMLDYKLRTGDMILLYKDNPAELYDLDNVNLSRRLYKINRFESQSNLVLMTHHLSTSKERGRSLGKTVDYQNLPESIRSSVKSLNFLIMGENRDFVIKNGKIIFNHR

SEQ ID NO: 632 - protein, 241 aa, Prevotella sp.
QAVKEKIKEAIAGKNFKTAIAEPIFMNKEKGIRINKVRYYVKAQERLKIRQQRDLSSKEYKQFFCVENESNYLLAIYEGELKGKKERDFCVVNNLDSAACLKRSNKGKAAPLVPERSEERNLPLLAVLKRGTQVLFYENSPEEILFDNPQDLVRRLYKVTGINTKKDVKNGKTYLYGNIELRFHQNAQKKDDVKMQSGVYKNNEVLRQGIVLSHKQFKALVEGVDFEFNVLGEIKKKERHA

SEQ ID NO: 633 - protein, 1216 aa, Prevotella stercorea
MTKILGIDTGTNSLGWAIVDKTADNYNLLDKGVNIFQEGVKIEKGIESSKAAERTEHRATRVRYYRIKLRKIRLLRILSDNHLCPPLSQEELSTWRLKKVYPKNELFMQWQRTDDDTEKTPYAYRHKCIHEKLDLSDVTDRYILGRAFYHIIQRRGFLSNRKEQGGEDSGKVKEGISTLTHEMNEAGYEYLGDYFYALYNKGEKIRKHYTARNEHFLSEFKAICEKQDLEKELGSEVVRNIEKAIFDQRPLKSQKGQVGKCVFEKNKTKCPSSHPMYEEFRMLTFINNIKIKTPNDDVLRPLNTGEREKIMPLFFRKSKKQFDFEDITKKLAPKKMYGFYKKEEDAEMPFLFNYPMDTSVSGCPVTAALKDVFGDDWITAICETYTLGEGKSRFDIVNDIWHALYFYSDKDKLAEFAINRLQLSEDEAKIFSEISLPADYASLSLKAICKILPYLRRGLIYSHAVFLGNLCEVMPKYEWSIKEMRETIIDNIIMEMDKCDTKDKRTFEVCIKDYLKGQYNVSDNSLKKLYHPSMIETYPRVQYTNEHGVYQLGSPRIDSVRNPMAMRSMFRLRKLVNRLLVEGKIDQNTEVHIEFARELNDANKRNAIALFVKENQSANDEARKQIITLFKKETGTDIEPTDKDILKYVLWEEQNHICLYTGKQIRISDFIGANPKFDIEHTIPRSVGGDSTKMNLTLCDSRFNREVKKTKLPVELPNHDEIMERIKEWKKNYELLDIQIRKNKKLSKGATTKEQKDTIIRKRHLLELRRDYWRGKYERFTMESVPEGFSRRQGTDISVISKYARLYLKSLFNRVYTVKGIATSDFRKIWGIQDIYSKKERINHVHHCIDAIVIACIGLDEYNKLGAYYHDEENNKWYGMSKASFKKPWATFVEDIKKIQDEILVYHYTPDNMPKQGRRRIKIDGKKILCKGDAARGSLHNDTYYGAIENDGAVKYVKRIDLASLEEKDVKNIVDDTVRSIIEAAIKEKGFKDAMASTIWMNEEKRVPIKKVRCFTPSITKPLNIRKQRDVSIKEYKQQYHVANDSNYLLALYIGTDNKGKEKREFEIVNILQAAQYYRTSNDKEVVDRHIVPIKSEHDYPFAYTLKIGTMVLLYEKSPNEVWDATIKERNRRLYKVTGLSTMRMKGRNGEYAYATVKLIHNEEARPSKDIKAKNGEYEQGEEFRPAIIMLHTQLNALVQGYDFEINELGEIRRLR

SEQ ID NO: 634 - protein, 1487 aa, Prevotella timonensis; identical to SEQ ID NO: 145

SEQ ID NO: 635 - protein, 770 aa, Pseudoramibacter alactolyticus
MAKGYFASDEEIDFSGVDDGFKNTLSSHQKFKEIFDVEVLNDWQKSMSEKIIFWATVYGDSKKFLKERLEDAYGNELDQKQIKRILGLRFKDWGRLSEAFLNLEGKNSKTNQSQTIIEALWNGDGTNNFNLMELLSSQFTYRDTLKKRALKGEKTLTNITYEDLSDLYLSPSVRRMVWQTILIVKELRQVLGAGPAKIFIEMARDVTLKAGTRTTSRRQQLLDLYKNVQTESRNWVEEIETQEESRFRSKKIFLYYTQMGQCMYTGEPIVFKDLFNRNLYDIDHIYPRHFVKDDSLINNLVLVKKQANSHKSDTFPIENSIQQARRDFWKWLSEKGLISREKFNRLTRRTSFSDEELAGFISRQIVETRQGTKAVAQIFENALPDSEVVYVKAGNVSDFRHHFNLLKCREINDLHHAQDAYLNVVVGNVYHTKFTKNPINFIKGYRKDRKAYAYHMDQIFDHPVKRNDIIAWQTDKNQSIATVKKVMAKGTPLVTRMSYEEHGELSNQNICSAKAAQKAEGKGYLPIKNSERLSNTQRYGGYNKYAGSYFFLVEHTLKKNRVRTIETMPLFLRDTIKTSKDLLKYCCESLKLEAPSIRVMKIKMGSLLSVNGAFVYLTGRSGKKLITPNGFQLILPQKWQDYIRLLIKTKDSPDDVEGISGGKNIEFYDILVEKHTKTCLKNRPNPIGEKLREWRNDFIALDNQKQSDILLEILKLTTFDNSGADLRAIGGKNQSGVSTIGKKISSQKSVVLVHRSVTGIFEKQVDLLSI

SEQ ID NO: 636 - protein, 103 aa, Rhizobium etli
MSGEQLTREIGRSGVKASAVGLGTWAIGGWMWGGTDEAQSIAAIQASLDAGVTLIDTAPAYGLGRSEEIVGKALAGRRDKAVIATKCGLVWHTQKGNHFFDQD

SEQ ID NO: 637 - protein, 1059 aa, Rhodovulum sp.
MGIRFAFDLGTNSIGWAVWRTGPGVFGEDTAASLDGSGVLIFKDGRNPKDGQSLATMRRVPRQSRKRRDRFVLRRRDLLAALRKAGLFPVDVEEGRRLAATDPYHLRAKALDESLTPHEMGRVIFHLNQRRGFRSNRKADRQDREKGKIAEGSKRLAETLAATNCRTLGEFLWSRHRGTPRTRSPTRIRMEGEGAKALYAFYPTREMVRAEFERLWTAQSRFAPDLLTPERHEEIAGILFRQRDLAPPKIGCCTFEPSERRLPRALPSVEARGIYERLAHLRITTGPVSDRGLTRPERDVLASALLAGKSLTFKAVRKTLKILPHALVNFEEAGEKGLDGALTAKLLSKPDHYGAAWHGLSFAEKDTFVGKLLDEADEERLIRRLVTENRLSEDAARRCASIPLADGYGRLGRTANTEILAALVEETDETGTVVTYAEAVRRAGERTGRNWHHSDERDGVILDRLPYYGEILQRHVVPGSGEPEEKNEAARWGRLANPTVHIGLNQLRKVVNRLIAAHGRPDQIVVELARELKLNREQKERLDRENRKNREENERRTAILAEHGQRDTAENKIRLRLFEEQARANAGIALCPYTGRAIGIAELFTSEVEIDHILPVSLTLDDSLANRVLCRREANREKRRQTPFQAFGATPAWNDIVARAAKLPPNKRWRFDPAALERFEREGGFLGRQLNETKYLSRLAKIYLGKICDPDRVYVTPGTLTGLLRARWGLNSILSDSNFKNRSDHRHHAVDAVVIGVLTRGMIQRIAHDAARAEDQDLDRVFRDVPVPFEDFRDHVRERVSTITVAVKPEHGKGGALHEDTSYGLVPDTDPNAALGNLVVRKPIRSLTAGEVDRVRDRALRARLGALAAPFRDESGRVRDAKGLAQALEAFGAENGIRRVRILKPDASVVTIADRRTGVPYRAVAPGENHHVDIVQMRDGSWRGFAASVFEVNRPGWRPEWEVKKLGGKLVMRLHKGDMVELSDKDGQRRVKVVQQIEISANRVRLSPHNDGGKLQDRHADADDPFRWDLATIPLLKDRGCVAVRVDPIGVVTLRRSNV

SEQ ID NO: 638 - protein, 1405 aa, Riemerella anatipestifer
MKTILGLDLGTNSIGWALVKEAENSNEKSEIIKLGVRVNPLTVDEKTNFEAGRPLSTNADRTAKRSARRNLQRYKLRRKNLIDLLIKNQLIDKDTPLTEIGKNTTHQTLELRAKAARERIELEDLARVFLAINKKRGYRSSRKVNNEEEGQAVDGMAVAKKLYDENLTPGQYAYELLSKGKKYVPDFYRSDLQAEFNAIWEYQKQFYADILDDELYNALKGQGQQNSRKRFLAIKGVYTAENKGKRDDVKLRHYKWRSEAISKKINIEEVAYVLVEINNDLNKSSGYLGAISDRSKELYFNKETVGENLWKQIQKNPHTSLKNQVFYRQDYLDEFEQIWETQAQFHPQLTLALKEQIRDVIIFYQRKLKSQKGLLSFCQFESWEIERKDENGNVILNKTTQLPKRQTVGRRVAPKSSPLFQEFKIWQNINNLEVTKISEGASKNKKETETLSDDERKLLFEELNLRGNLSQKEVLQILGLKDKEYKTNFSEGLEGNRTNAALFNIYQQIAENEGYGFDWSKKSAQEIKEELKAVFPQIGIQADILDFNANLDGKEFENQASYQLWHLLYSAEEDDKINEEDQIIYGNSAVSLKKKLCEKFGFTPEYAKWIANVSLQDDYGNLSTKAMRKIIPYLIDGNDYSEACALAGYNHSNSLTKEENDNRELLDKLELLPKNSLRNPVVEKILNQMVNVVNQVIETYGKPDEVRIELARELKKSAEKRAEMTKSINEATRRNEDIKKLITKDFGIPNPTKSDVVRYRLWEELAPLAYKDVFTGKQIKKEDLFSSKIDIEHIIPKALLFDDSFSNKTLVFRETNLKKADRTAYDFIESDYNATLDDYIQRVETLYNNTKGTISKGKRNKLLMAQKNLPDGFIERDLRNSQYIAKKAKAMLYQVFKDVNVTSGSITDRLREDWDLINVMKELNFPKYKALGLTEIEERYDIGQEKTKRVEVITDWTKRNDHRHHAMNALTVAFTTSSHIQYLNYLNARKNESHKEHKNIKGIENKITHKQKDKRKFIPPMPNFREEAKKHIETILVSIKNKNKVYTKNINKTKKKSGHNTKEQLTPRGQLHKETVYGKSKRPMSKPTKINKNFSLEQAQLIINVQEKELVLRHLAQFDNNPAVAFDTKTLKKMPLLKNGEPLKEVLCFEEIFTIRKDITPDLKIEKVVDEKIKAILEQRKKDFGGNAKEAFSDLDKNPIWLNKKKGICIKRVTITGVSNAEALHHQKDHLGREILDDNGNPIPADFVSTGNNHHLAVYLDSEGKLQDNIVSFYEAVVRTSQGLPVVDKGLNKDLGWKFLFSLKQNEMFVFPNDDFDINDFDLLDDKKAELISKHLYRVQKISKVSAGNSFVRDIVFRHHLETTVKEVKELKDISYIQLKSLEGLRNIKKVRINHIGKIVQVGEY

SEQ ID NO: 639 - protein, 1145 aa, Riemerella anatipestifer
MKTILGLDLGTNSIGWALVKETENSNEKSEIIKLGVRVNPLTVDEKTNFEAGRPLSTNADRTAKRSARRNLQRYKLRRKNLIDLLIKHRLIDKDTPLTEIGKNTTHQTLELRAKAARERIELEDLARVFLAINKKRGYRSSRKVNNEEEGQVVDGMAVAKKLYDENLTPGQYAYELLSKGKKYVPDFYRSDLQAEFDSIWEYQKQFYADILDDELYNALKGQGQQNSRKRFLAIKGVYTAENKGKRDEVKLQHYKWRSEAITQKLSIEEVAYVLVEINNDLNKSSGYLGAISDRSKELYFNKETVGENLWKQIQKNPHTSLKNQVFYRQDYLDEFEQIWETQAQFHPQLTLALKEQIRDVVIFYQRKLKSQKGLLSFCQFESWEIERKDENGNVILNKTTQLPKRQTVGRRVAPKSSPLFQEFKIWQNINNLEIAKISDGNSKNKKETEALSDDERKLLFEELNLRGNLSQKEVLQILGLKDKEYKTNFPEGLEGNRTNAALFNIYQQIAENEGYGDWTKKSAQEIKEELKAVFPQIGIQADILDFNAELDGKEFENQASYQLWHLLYSAEEDDKINEEDQIIYGNSAVSLKKKLCEKFGFTPEYAKWIANVSLQDDYGNLSTKAMRKIIPYLIDGNDYSEACALAGYNHSNSLTKEENDNRERLNKLELLPKNSLRNPVVEKILNQMVNVVNQVIETYGKPDEVRIELARELKKSAEERAEMTKGINEATRRNEDIKKLITKNFGIPNPTKNDVVRYRLWEELAPLAYKDVFTGRQIKKEDLFSSKIDIEHIIPKALLFDDSFSNKTLAFRETNLKKADRTAYGFIESDYNATLDDYIQRVETLYNNAKGTISKGKRNKLLMAQKNLPDGFIERDLRNSQYIAKKAKSMIEKVFNDVNVTSGSITDRLREDWDLINVMKELNFPKYKALGLTEIEERYDIGQEKTKKVEVITDWTKRNDHRHHAMDALTVAFTTKSHVQYLNNLNTIHSLKGDEVDLELSKLYGLKNTITEVVNKKRKFIPPMPNFREEAKKHIETILVSIKNKNKVYTKNINKTKKESGYHTKEQLTPRGQLHKETVYGKSKRPMNKPTKINKNFSLEQAQLIINVQEKELVLRHLAQFDNNPAVAFDTKTLKKCHYLKMVNL

SEQ ID NO: 640 - protein, 1400 aa, Riemerella anatipestifer
MKTILGLDLGTNSIGWALVKETENSNEKSEIIKLGVRVNPLTVDEKTNFEAGRPLSTNADRTAKRSARRNLQRYKLRRKNLIDLLIKHRLIDKDTPLTEIGKNTTHQTLELRAKAARERIELEDLARVFLAINKKRGYRSSRKVNNEEEGQVVDGMAVAKKLYDENLTPGQYAYELLSKGKKYVPDFYRSDLQAEFDSIWEYQKQFYADILDDELYNALKGQGQQNSRKRFLAIKGVYTAENKGKRDEVKLQHYKWRSEAITQKLSIEEVAYVLVEINNDLNKSSGYLGAISDRSKELYFNKETVGENLWKQIQKNPHTSLKNQVFYRQDYLDEFEQIWETQAQFHPQLTLALKEQIRDVVIFYQRKLKSQKGLLSFCQFESWEIERKDENGNVILNKTTQLPKRQTVGRRVAPKSSPLFQEFKIWQNINNLEIAKISDGNSKNKKETEALSDDERKLLFEELNLRGNLSQKEVLQILGLKDKEYKTNFPEGLEGNRTNAALFNIYQQIAENEGYGDWTKKSAQEIKEELKAVFPQIGIQADILDFNAELDGKEFENQASYQLWHLLYSAEEDDKINEEDQIIYGNSAVSLKKKLCEKFGFTPEYAKWIANVSLQDDYGNLSTKAMRKIIPYLIDGNDYSEACALAGYNHSNSLTKEENDNRERLNKLELLPKNSLRNPVVEKILNQMVNVVNQVIETYGKPDEVRIELARELKKSAEERAEMTKGINEATRRNEDIKKLITKNFGIPNPTKNDVVRYRLWEELAPLAYKDVFTGRQIKKEDLFSSKIDIEHIIPKALLFDDSFSNKTLAFRETNLKKADRTAYGFIESDYNATLDDYIQRVETLYNNAKGTISKGKRNKLLMAQKNLPDGFIERDLRNSQYIAKKAKSMIEKVFNDVNVTSGSITDRLREDWDLINVMKELNFPKYKALGLTEIEERYDIGQEKTKKVEVITDWTKRNDHRHHAMDALTVAFTTKSHVQYLNNLNTIHSLKGDEVDLELSKLYGLKNTITEVVNKKRKFIPPMPNFREEAKKHIETILVSIKNKNKVYTKNINKTKKESGYHTKEQLTPRGQLHKETVYGKSKRPMNKPTKINKNFSLEQAQLIINVQEKELVLRHLAQFDNNPAVAFDTKTLKKMPLLKNGEPLKEVLCFEEIFTIRKDITPDLKIEKVVDEKIKAILEQRKKDFGGNAKEAFSDLDKNPIWLNKEKGICIKRVTITGVSNAEALHHQKDHLGREILDDNGNPIPADFVSTGNNHHVAIYEDEKGKLQEKVVSLYEAVARANQGLPVVDKGLNEDLGWKFLFTMKQNEMFVFPNDDFDVNDIDLLDENNAKIISQHLFRVQKLATKNYMFRHHLETNVQEVKELNDIAYKSIRSTEPLKNIKKVRINHIGKIVQVGEY

SEQ ID NO: 641 - protein, 1128 aa, Roseburia intestinalis
MDEKMDYRIGLDIGIASVGWAVLQNNSDDEPVRIVDLGVRIFDTAEIPKTGESLAGPRRAARTTRRRLRRRKHRLDRIKWLFENQGLINIDDFLKRYNMAGLPDVYQLRYEALDRKLTDEELAQVLLHIAKHRGFRSTRKAETAAKENGAVLKATDENQKRMQEKGYRTVGEMIYLDEAFRIGCSWSEKGYILTPRNKAENYQHTMLRAMLVEEVKEIFSSQRRLGNKKATEELEEKYLEIMTSQRSFDLGPGMQPDGKPSPYAMEGFSDRVGKCTFLGDQGELRGAKGTYTAEYFVALQKINHTKLVNQDGETRNFTEEERRALTLLLFTQKEVKYAAVRKKLGLPEDILFYNLNYKKAATKEEQQKENQNTEKAKFIGMPYYHDYKKCLEERVKYLTENEVRDLFDEIGMILTCYKNDDSRTERLAKLGLVPIEMEGLLAYTPTKFQHLSMKAMRNIIPFLEKGMTYDKACEEAGYDFKADSKGTKQKLLTGENVNQTINEITNPVVKRSVSQTVKVINAIIRTYGSPQAINIELAREMSKTFEERRKIKGDMEKRQKNNEDVKKQIQELGKLSPTGQDILKYRLWQEQQGICMYSGKTIPLEELFKPGYDIDHILPYSITFDDSFRNKVLVTSQENRQKGNRTPYEYMGNDEQRWNEFETRVKTTIRDYKKQQKLLKKHFSEEERSEFKERNLTDTKYITTVIYNMIRQNLEMAPLNRPEKKKQVRAVNGAITAYLRKRWGLPQKNRETDTHHAMDAVVIACCTDGMIQKISRYTKVRERCYSKGTEFVDAETGEIFRPEDYSRAEWDEIFGVHIPKPWETFRAELDVRMGDDPKGFLDTHSDVALELDYPEYIYENLRPIFVSRMPNHKVTGAAHADTIRSPRHFKDEGIVLTKTALTDLKLDKDGEIDGYYNPQSDLLLYEALKKQLLLYGNDAKKAFAQDFHKPKADGTEGPVVRKVKIQKKQTMGVFVDSGNGIAENGGMVRIDVFRVNGKYYFVPVYTADVVKKVLPNRASTANKPYSEWRTMEDKDFLFSLYSRDLVHIKSKKGIPIKNVDGSLGESKEVYAYYIGADISGAKIEGKAHDSRYTFRGIGVQKLELIEKCQVDILGHISTVKNEKRMGFS

SEQ ID NO: 642 - protein, 1471 aa, Scardovia wiggsiae
MGYKAPRNDKGEIDYGVGLDLGNGSVGWVAMDKDYHLIRARGHELIGARLFDPANSAENRRESRTTRRRLSRRRWRLRMLDSLFASELAKIDPNFLARRKYSWVHPKDEQNHENWYGSIIFGSKEQDKQFYKDYPTIYHLRKKLTEDTERHDIREIYVAIHHIVKYRGHFLREGEINSENLFDPEGFVELIKDVIKLNNSYDESTPIFEASPADVSEALLNEHTSRSGRIEDTLDKLDFSVSRVDKHELKGMRDAAKAVIGAIVGNTADFSKIFNLDNLDKDSKDNLKLKFADSNFDEKYGGVVGSGLLDETQIELVDRIHAVYDAVALKGILGDAHTISEAKVESYEKHRKNWKLIKEELRTKENKDEVDLWYGDLSGRQYKNPPDPEKGPDEGSKKDSPIRDSDQKQNLIKKANDYFTELIDDSQLSEEQKNCLKNDINNGQLFPVQRSSDNGVIPYQIHLNELRRIIENQKQYYPFLAETFIRKTAEGKSYEENKIVALLKFRVPYYVGPLVSKEDMEEHSSGNSAYHWMARNPGRGEAITPWNFDEVVDKDESGARFISRLTGTDTYLLGEPTLPQHSLLYEEYMVLSELNNVRLNVRQGNHWSDKNRQRLSYKQKEFLIENLFKEHKTVTRKRAEDCLSSMGCGEVQLFGLSDEKKFASSLSSYITLKKILGKAFVDDSGNSAILERIIEVQTVFEDREPLTHQLSLIDSLTVEQRKQLAKIHYTGWGKLSRKLLTSKKGSYKIHSQNEIMRTQHSIIDIMRGDSLNLIEIIRDKKIGIGEWIDNENLDRETGESDVSRLESVFEGIVMSPRVKRGVVQAVRVIDDLAKAIGNPPQRIFIEMADEVQASQRTVSRLSRLKALYGSPSLQKEFNDLKDLRKSLNETKDADLQEDRLYLYYIQLGKDLYTGKEISIDSLSSAYDIDHIVPQALTQDDSIDNRVLVSRKENARKTDSYLYTPDLIKNMRPLWGKLLAAGLMSQKKYDALTRVDDFKDREKQRFVQRSLVETRQIMKNVSTILRTYYGEDTNVVTLKSSITHDMRKYLGFPYKNRDINDYHHAQDALCISAAGQFMLNRHFVSGGEVTDGASNAYNMYLAEYLQEFRDAKARGERKRSTAFGFVVGSMSSKDDEKRTDHRTGEIVWSETNAEYLRKVMNYKKMLITQKVGDVKTRALYDETRYGHKESSAKSIKFDNLRRDTSLYGGFSGASTAYMMLVEYKKKNKLVSITAQEASLLAVADQKNDTVSVMDGILASHGLSGAKILLPKIVTGQLLDYSDALVTLQSASELNTARQMWLPRNDYNDIDIILKSKDIEDAAHKLGYDSDTVHVLRRIQKLFEAVFRVAESQFPLHQLSKDQQEEILRDPQNYGFGSAVKLLGGLLKALHANAENTNLAGLVKVLHGDKEYSDDGKAKEFKKFGFSPRWRRISNPTGFTLSDSDTFIYQSPSGIFEQRVTVKELKEKADKQK

SEQ ID NO: 643 - protein, 116 aa, Sphingobacterium spiritivorum
MFRKYFEEKNSARLLFTLKQGDFVYVPDDNEEVILDESSPLFIDYWKNISERSNNIHVVQKFSGKEIYFLKHTIADTIAKKIEFGSQDCYQSLNGKSIKEFCIKIDSDRLGNISKV

SEQ ID NO: 644 - protein, 1306 aa, Sphingobacterium spiritivorum; identical to SEQ ID NO: 108

SEQ ID NO: 645 - protein, 1110 aa, Sphingobium sp.
MAEGKKRIWRLGADLGANSLGWAAIELSAPVNGKPIAILAAGSRIFSDGRDPKSGASLAVDRRDARAMRRRRDRFKQRQKALIKYLIADGLFPADEAARNAMAAIDPYAVRARALDEALSLPELGRALFHLNQRRGFKSNRKADRKADDDAGKIAIGIDRTRDAIAEDEADAGAEPGSWTFGKWLHERRLKGQSVRTRLRPESGEDAKGDGYDFYPDRALMEEEFDAIWAAQAPHHPDVLTNDVHDRLHEIIFYQRPLKAPQVGMCSLIPGDRRLPKAHPLFQRRRLLEELNALMIVRPGEVAQRLTREERDILLLKLKDKNKVSFATLRKALKLDPDARFNKESEDRTDLKGDEVAAVMGSKTRFGNLWVHLSIEAQWDVLARLDAVESDAEDAAFCAWLVETYALTPEQARAVANAPLPPGYGRFGETATRKLIEALRDGKKDDRVLVYSEAVTEAGLGHHSDRRTGEVFEDAKGRPQLPYYGVALERHIMPGTGDPSDPEEMRVGRLTNPTVHIGLNQLRRILNVLIRAYGPPAEIAIELARELKLTDEDKKRINRENNDNRIAAERRSEKLLAIGQADSGANRALLKLWEELNPANVLDRRCIYSGRQISIDMLFSAAVEVDHILPFAATLDDSNGNKIVCLREANREKRKRSPHDAWGHSARWDEIAARAAQLPRNKRWRFEPDAMDKFRDEGGFQARHLVDTQYLARLSREYLATLYPEKGEGSGHIWVSPGRLTEMVRRKLGLNDLLPDHNFGGGADQAKNRLDHRHHAIDAVVVAIVDRGMLNAIARASGQEGAEGRERIIIPEPWDGFRDALRETVNRITVSHRTDHGTASKAGLPKGKDATAGRLHNDTAYGFTGDTDAKGNSIVVRRVPLSSFKKLADLDRIRDADLKAALYQHLNGLEGKAFEKALAEFHKLEWHNFGGVRRVRVTEPLTVIPIKDRNGRIYKGYKGDSNYRYDVWELPDGKWVTNWKNEAGEAMSSVISMFDAHQSSEPPRPHPAARKILSLHQNDLLAIEREGEDRKLMRVVKFGQSGQITLAEHQQAGDLKKRDAVSNDDDPFKYFAPTSGGLKKVKARQVRIDEIGRVLDPGFPARTARRKTRG

SEQ ID NO: 646 - protein, 1084 aa, Sporolactobacillus vineae
MKYSIGLDIGISSVGWSVINLDRERIELMGARLFDAAENPKNGSSLAAPRRDARSARRRLRRRRYRVGRVRHFIIDRGLVTRGQADQLFDWKDGDLDIWLVRVNALERLLTDREFARVLIHIAKNRGYRSNRKSEAKSGENGQVLSAIKANKELMEEKGYQTVAEMLVNEPETFAGRKRNRGGEYTHVIARSELEHEIRLIFTKQRAFGNRFATEENENTYVKIWAAQRPVATKDDILKKIGDCTFEKGEKRAPKASYAFQYFRALDKLNRLRILSVREPSRNLTDDERNLIVPALFNHDKQKYSDLRKILQLRDDQKFNELFYDPGKSLKENENKTFLSLAEQYKIRKVIRDVQGKDGLLQYRPLDIDTIAYALTVFKDDQDTRDYLSNTFVNGNGKQVLNLANRAFDAELIDGLLSLSFAKFGHLSLKALHKLIPHMEQGLSYYDACKKVGYHDNEQVGKSKQHLLPVIPADEIRNPVVVRSLSQTRKVINAIIKRYGSPTFMYIELAREMGRPYNERRDLEKQYNKNRTVNDSAIEQIHELYPEIGAPRGHDILKYKLWQQQDCKCAYSLEKIPAEKIFEPGYAEVDHIIPYSRSFDDSNSNKVLVLSRMNQEKKNRTPYEWFGGDEHRWNKFESYVNALKVNRKKKSLLTKKNMDTEEEDTFKSRHLNDTRYITRFIKSFVEDNLLFREIEGAKQHVFTVNGAYTSLMRKRWGFNKNREESDLHHSVDAVIIAVSQPFRNEVSRYFKHREISLPQLLKRTWDYFPEPWEGFVKELRARTLQDPEKLKLALESLDLDSYDPEFIDEVKPIFISRMPKRSIKGQIHDETLRRNRGKTKDGFVKIVTRTRLENIKFDKNGDFPMYGRESDPKTYQAIKQRYLENNKDKKKAFIEPLYKPAKNPNNASLIRSVKIEDKANQIVPLRDEAVAYNASIVRTEVYRNKETGKFYLAPVYVSDVFAGREPRRFIRANVPYEQWVNITDKFTFLFNLYPNDVIYIKMKKVKTTKSNINKTISWQESYFYFKGTDIHTGAITIIDHMNSFTDRVGTQGLQLFEKYQVDPLGNLSRVHGETQYGVPALSHS

SEQ ID NO: 647 - protein, 475 aa, Staphylococcus massiliensis
MGQDYILGLDIGITSVGYGLIDYHDKSVIDAGVRLFKEANVENNEGRRSKRGSRRLQRRRKHRLARTRNLLESYQLNPFPKCEKNPYEIRVKGFKEVLTSDELSAALLHLAKRRGIDNVHVTDTESDSSDNGLSTKEQLAKNQKALESRYVCELQLERLLNDNKVRGANNRFKTQDFVREAKQILSIQKDHHNLDQVFIDKYISLLETRREYYEGPGKGSPYGWDGDIKKWYELLMGRCTYFPESLRSVKYAYSADLFNALNDLNNLVIVRDENDKLTYPEKYHIVENVFKQRKKPTLKQIAKEIDVAPEDIRGYRVTASGTPVFTSFKLYHDIKSVTSNDKVLEDTELLDAIAEVLTIYQSPIEVQEKLESLNVILTKEEIEGISKLTGYTGTHALSLKAIQIVIDELWETNDNQMTIFTRLNMKPQKVDLAKANKIPTSLVEDFIISPVAKRAFIQSIKVINAVIKNMVCLKI

SEQ ID NO: 648 - protein, 581 aa, Staphylococcus massiliensis
MPKDIIIELAREKNSDEERKIIRDVQKRNQQTRDLVDKVIKETGKTKAKGMVEKLILHDKQEGKCLYSLKSIPLEDLLNNPHHYEVDHIIPRSVSYDNSMNNKVLVLQEENSKKSNQTPFQYFNSSNTHITFKQFKQHVLNLSKTKDRITKKKKEYLLEERDINKFSVQKEFINRNLVDTRYATRELMTLLRAYFSANELDVKVKAINGGFTSYLRKRWDFKKDRNAGYKHHAEDALIIANVDFIFKQLKALDNAKKVMEGRKVQVEKDNVEDNEHYESLFREPDQIKEIKLYDNYKFSHRVDKKPNRELINDTIYSTRKVDNKTYTIQTVNNIYDKQNDQLKKLFNKSPEKFLMYKHDPKTFDKLATIMRQYKNEKNPLYKFHDETGEYLTKYAKKDNGPIVKSLKYIGKQVNAHLDITNDYENSNNKVVKLSLKPFRFDVYLDDGKYKFVTVKYLDIIKKDTYYVIDEEKYKLALQQKKISENAKFIGSFYNNDLIKINGELLRVIGVNDDAKNTLELNMIDISYRDYVENMNLATTPRIRKNIGKSITILEKYTTDILGNTFKISSPEKPQFIFKVRD

SEQ ID NO: 649 - protein, 1334 aa, Staphylococcus pseudintermedius; identical to SEQ ID NO: 215

SEQ ID NO: 650 - protein, 1112 aa, Staphylococcus simulans; identical to SEQ ID NO: 262

SEQ ID NO: 651 - protein, 773 aa, Streptococcus agalactiae
MNKPYSIGLDIGTNSVGWSIITDDYKVPAKKMRVLGNTDKEYIKKNLIGALLFDGGNTAADRRLKRTARRRYTRRRNRILYLQEIFAEEMSKVDDSFFHRLEDSFLVEEDKRGSKYPIFATLQEEKDYHEKFSTIYHLRKELADKKEKADLRLIYIALAHIIKFRGHFLIEDDSFDVRNTDISKQYQDFLEIFNTTFENNDLLSQNVDVEAILTDKISKSAKKDRILAQYPNQKSTGIFAEFLKLIVGNQADFKKYFNLEDKTPLQFAKDSYDEDLENLLGQIGDEFADLFSAAKKLYDSVLLSGILTVIDLSTKAPLSASMIQRYDEHREDLKQLKQFVKASLPEKYQEIFADSSKDGYAGYIEGKTNQEAFYKYLSKLLTKQEDSENFLEKIKNEDFLRKQRTFDNGSIPHQVHLTELKAIIRRQSEYYPFLKENQDRIEKILTFRIPYYIGPLAREKSDFAWMTRKTDDSIRPWNFEDLVDKEKSAEAFIHRMTNNDFYLPEEKVLPKHSLIYEKFTVYNELTKVRYKNEQGETYFFDSNIKQEIFDGVFKEHRKVSKKKLLDFLAKEYEEFRIVDVIGLDKENKAFNASLGTYHDLEKILDKDFLDNPDNESILEDIVQTLTLFEDREMIKKRLENYKDLFTESQLKKLYRRHYTGWGRLSAKLINGIRDKESQKTILDYLIDDGRSNRNFMQLINDDGLSFKSIISKAQAGSHSDNLKEVVGELAGSPAIKKGILQSLKIVDELVKVMGYEPEQIVVEMARENQTTNQ

SEQ ID NO: 652 - protein, 1370 aa, Streptococcus agalactiae
MNKPYSIGLDIGTNSVGWSIITDDYKVPAKKMRVLGNTDKEYIKKNLIGALLFDGGNTAADRRLKRTARRRYTRRRNRILYLQEIFAEEMSKVDDSFFHRLEDSFLVEEDKRGSKYPIFATMQEEKDYHEKFPTIYHLRKELADKKEKADLRLVYLALAHIIKFRGHFLIEDDRFDVRNTDIQKQYQAFLEIFDTSFENNHLLSQNVDVEAILTDKISKSAKKDRILAQYPNQKSTGIFAEFLKLIVGNQADFKKHFNLEDKTPLQFAKDSYDEDLENLLGQIGDEFADLFSAAKKLYDSVLLSGILTVTDLSTKAPLSASMIQRYDEHREDLKQLKQFVKASLPEKYQEIFADSSKDGYAGYIEGKTNQEAFYKYLSKLLTKQEDSEYFLEKIKNEDFLRKQRTFDNGSIPHQVHLTELKAIIRRQSEYYPFLKENQDKIEKILTFRIPYYVGPLARGNSDFAWMTRKTDDSIRPWNFEDLVDKEKSAEAFIHRMTNNDLYLPEEKVLPKHSLIYEKFTVYNELTKVRYKNEQGETYFFDSNVKQEIFDGVFKEHRKVSKKQLLDFLAKEFEEFRIVDVTGLDKENKAFNASLGTYHDLKKILDKDFLDNPDNESILEDIVQTITLFEDREMIKKRLENYKDLFTESQLKKLYRRHYTGWGRLSAKLINGIRDRESQKTILDYLISDGRANRNFMQLINDDGLSFKSIISKAQSGSHSDNLKEVVGELAGSPAIKKGILQSLKIVDELVKVMGYEPEQIVVEMARENQTTNQGRRNSRQRYKLLEDGVKNLASDLNGDILKEYPTDNQALQNERLFLYYLQNGRDMYTGEALDIDNLSQYDIDHIVPQAFIKDDSIDNRVLVSSAKNRGKSDDVPSIDIVKARKAFWKKLLDAKLISQRKYDNLTKAERGGLTPDDKAGFIQRQLVETRQITKHVARILDERFNNKVDDNNKPIRKVKIVTLKSNLVSNFRKEFGFYKIREVNNYHHAHDAYLNAVVAKAILTKYPQLEPEFVYGDYPKYNSYKTRKSATEKLFFYSNIMNFFKTKVTLADETVVVKDDIEVNNETGEIAWDKKKHFATVRKVLSYPQVNIVKKTEVQTGGFSKESILAHSNSDKLIPRKTKDIYLDPKKYGGFDSPIVAYSVLVLADIKKGKAQKLKTVKELIGITIMERERFEKNPSAFLESKGYLNIRTDKLIILPKYSLFELENGRRRLLASAGELQKGNELALPTQYMKFLYLASRYNESKGKPEEIEKKQEFVNQHVSYFDDILQLINDFSKRVILADANLEKINKLYSDNKDNTPVDELAKNIINLFTFTSLGAPAAFKFFDKSVDRKRYTSTKEVLDSTLIHQSITGLYETRIDLGKLGED

SEQ ID NO: 653 - protein, 1370 aa, Streptococcus agalactiae
MNKPYSIGLDIGTNSVGWSIITDDYKVPAKKMRVLGNTDKEYIKKNLIGALLFDGGNTAADRRLKRTARRRYTRRRNRILYLQEIFAEEMSKVDDSFFHRLEDSFLVEEDKRGSKYPIFATMQEEKDYHEKFPTIYHLRKELADKKEKADLRLVYLALAHIIKFRGHFLIEDDRFDVRNTDIQKQYQAFLEIFDTSFENNHLLSQNVDVEAILTDKISKSAKKDRILAQYPNQKSTGIFAEFLKLIVGNQADFKKHFNLEDKTPLQFAKDSYDEDLENLLGQIGDEFADLFSAAKKLYDSVLLSGILTVTDLSTKAPLSAYMIQRYDEHREDLKQLKQFVKASLPEKYQEIFADSSKDGYAGYIEGKTNQEAFYKYLSKLLTKQEDSEYFLEKIKNEDFLRKQRTFDNGSIPHQVHLTELKAIIRRQSEYYPFLKENQDKIEKILTFRIPYYVGPLARGNSDFAWMTRKTDDSIRPWNFEDLVDKEKSAEAFIHRMTNNDLYLPEEKVLPKHSLIYEKFTVYNELTKVRYKNEQGETYFFDSNVKQEIFDGVFKEHRKVSKKQLLDFLAKEFEEFRIVDVTGLDKENKAFNASLGTYHDLKKILDKDFLDNPDNESILEDIVQTITLFEDREMIKKRLENYKDLFTESQLKKLYRRHYTGWGRLSAKLINGIRDRESQKTILDYLISDGRANRNFMQLINDDGLSFKSIISKAQSGSHSDNLKEVVGELAGSPAIKKGILQSLKIVDELVKVMGYEPEQIVVEMARENQTTNQGRRNSRQRYKLLEDGVKNLASDLNGDILKEYPTDNQALQNERLFLYYLQNGRDMYTGEALDIDNLSQYDIDHIVPQAFIKDDSIDNRVLVSSAKNRGKSDDVPSIDIVKARKAFWKKLLDAKLISQRKYDNLTKAERGGLTPDDKAGFIQRQLVETRQITKHVARILDERFNNKVDDNNKPIRKVKIVTLKSNLVSNFRKEFGFYKIREVNNYHHAHDAYLNAVVAKAILTKYPQLEPEFVYGDYPKYNSYKTRKSATEKLFFYSNIMNFFKTKVTLADETVVVKDDIEVNNETGEIAWDKKKHFATVRKVLSYPQVNIVKKTEVQTGGFSKESILAHSNSDKLIPRKTKDIYLDPKKYGGFDSPIVAYSVLVLADIKKGKAQKLKTVKELIGITIMERERFEKNPSAFLESKGYLNIRTDKLIILPKYSLFELENGRRRLLASAGELQKGNELALPTQYMKFLYLASRYNESKGKPEEIEKKQEFVNQHISYFDDILQLINDFSKRVILADANLEKINKLYSDNKDNTPVDELAKNIINLFTFTSLGAPAAFKFFDKSVDRKRYTSTKEVLDSTLIHQSITGLYETRIDLGKLGED

SEQ ID NO: 654 - protein, 1378 aa, Streptococcus agalactiae
MNKPYSIGLDIGTNSVGWSIITDDYKVPAKKMRVLGNTDKEYIKKNLIGALLFDGGNTAADRRLKRTARRRYTRRRNRILYLQEIFAEEMSKVDDSFFHRLEDSFLVEEDKRGSKYPIFATMQEEKYYHEKFPTIYHLRKELADKKEKADLRLIYLALAHIIKFRGHFLIEDDRFDVRNTDIQKQYQAFLEIFDTTFENNDLLSQNVDVEAILTDKISKSAKKDRILARYPNQKSTGIFAEFLKLIVGNQADFKKHFNLEDKTPLQFAKDSYDEDLENLLGQIGDEFADLFSAAKKLYDSVLLSGILTVIDLSTKAPLSASMIQRYDEHHEDLKHLKQFVKASLPENYREVFADSSKDGYAGYIEGKTSQEAFYKYLLKLLTKQEGSEYLLEKIKNEDFLRKQRTFDNGSIPHQVHLTELRAIIRRQSEYYPFLKENLDRIEKILTFRIPYYVGPLAREKSDFAWMTRKTDDSIRPWNFEDLVDKEKSAEAFIHRMTNNDLYLPEEKVLPKHSLIYEKFTVYNELTKVRFLAEGFKDFQFLNRKQKETIFNSLFKEKRKVTEKDIISFLNKVDGYEGIAIKGIEKQFNASLSTYHDLKKILGKDFLDNTDNELILEDIIQTLTLFEDREMIKKRLDIYKDFFTESQLKKLYRRHYTGWGRLSAKLINGIRNKENQKTILDYLIDDGSANRNFMQLIKDAGLSFKPIIDKARTGSHSDNLKEVVGELAGSPAIKKGILQSLKIVDELVKVMGYEPEQIVVEMARENQTTAKGLSRSRQRLTTLRESLGNLKSNILEEKKPKYVKDQVENHHLSDDRLFLYYLQNGKDMYTDDELDIDNLSQYDIDHIIPQAFIKDDSIDNRVLVSSAKNRGKSDDVPSIEIVKARKMFWKNLLDAKLMSQRKYDNLTKAERGGLTSDDKARFIQRQLVETRQITKHVARILDERFNNELDSKGRRIRKVKIVTLKSNLVSNFRKEFGFYKIREVNNYHHAHDAYLNAVVAKAILTKYPQLEPEFVYGLYRRKKLSKIVREDKEEKYSEATRKMFFYSNLMNMFKRVVRLADGSIVVRPVIETGRYMGKTAWDKKKHFATVRKVLSYPQNNIVKKTEIQTGGFSKESILAHGNSDKLIPRKTKDIYLDPKKYGGFDSPIVAYSVLVVADIKKGKAQKLKTVTELLGITIMERSRFEKNTSAFLESKGYLNIRDDKLMILPKYSLFELENGRRRLLASAGELQKGNELALPTQFMKFLYLASRYNESKGKPEEIEKKQEFVNQHVSYFDDILQLINDFSNRVILADANLEKINKLYQDNKENIPVDELANNIINLFTFTSLGAPAAFKFFDKIVDRKRYTSTKEVLNSTLIHQSITGLYETRIDLGKLGEG

SEQ ID NO: 655 - protein, 1370 aa, Streptococcus agalactiae
MNKPYSIGLDIGTNSVGWSIITDDYKVPAKKMRVLGNTDKEYIKKNLIGALLFDGGNTAADRRLKRTARRRYTRRRNRILYLQEIFAEEMSKVDDSFFHRLEDSFLVEEDKRGSKYPIFATMQEEKYYHEKFPTIYHLRKELADKKEKADLRLIYLALAHIIKFRGHFLIEDDRFDVRNTDIQKQYQAFLEIFDTTFENNDLLSQNVDVEAILTDKISKSAKKDRILARYPNQKSTGIFAEFLKLIVGNQADFKKHFNLEDKTPLQFAKDSYDEDLENLLGQIGDEFADLFSAAKKLYDSVLLSGILTVTDLSTKAPLSASMIQRYDEHREDLKQLKQFVKASLPEKYQEIFADSSKDGYAGYIEGKTNQEAFYKYLSKLLTKQEGSEYLLEKIKNEDFLRKQRTFDNGSIPHQVHLTELRAIIRRQSEYYPFLKENLDRIEKILTFRIPYYVGPLAREKSDFAWMTRKTDDSIRPWNFEDLVDKEKSAEAFIHRMTNNDLYLPEEKVLPKHSLIYEKFTVYNELTKVRFLAEGFKDFQFLNRKQKETIFNSLFKEKRKVTEKDIISFLNKVDGYEGIAIKGIEKQFNASLSTYHDLKKILGKDFLDNTDNELILEDIVQTLTLFEDREMIRKRLDIYKDFFTESQLKKLYRRHYTGWGRLSAKLINGIRNKENQKTILDYLIDDGSANRNFMQLIKDAGLSFKPIIDKARTGSHSDNLKEVVGELAGSPAIKKGILQSLKIVDELVKVMGYEPEQIVVEMARENQTTAKGLSRLRQRLTTLRESLANLKSNILEEKKPKYVKDQVENHHLSDDRLFLYYLQNGKDMYTDDELDIDNLSQYDIDHIIPQAFIKDDSIDNRVLVSSAKNRGKSDDVPSVEIVKDCKVFWKKLLDAKLMSQRKYDNLTKAERGGLTSDDKARFIQRQLVETRQITKHVARILDERFNNELDSKGRRIRKVKIVTLKSNLVSNFRKEFGFYKIREVNNYHHAHDAYLNAVVAKAILTKYPQLEPEFVYGDYPKYNSYKTRKSATEKLFFYSNIMNFFKTKVTLADGTVVVKDDIEVNNDTGEIVWDKKKHFATVRKVLSYPQVNIVKKTEIQTGGFSKESILAHGNSDKLIPRKTKDIYLDPKKYGGFDSPIVAYSVLVVADIKKGKAQKLKTVTELLGITIMERSRFEKNPSAFLESKGYLNIRDDKLMILPKYSLFELENGRRRLLASADELQKGNELALPTQFMKFLYLASRYNELKGKPEEIEQKQEFVVQHVSYFDDILQIINDFSNRVILADANLEKINKLYQDNKENIPVDELANNIINLFTFTSLGAPAAFKFFDKIVDRKRYTSTKEVLNSTLIHQSITGLYETRIDLGKLGED

SEQ ID NO: 656 - protein, 1377 aa, Streptococcus agalactiae
MNKPYSIGLDIGTNSVGWSIITDDYKVPAKKMRVLGNTDKEYIKKNLIGALLFDGGNTAADRRLKRTARRRYTRRRNRILYLQEIFAEEMSKVDDSFFHRLEDSFLVEEDKRGSKYPIFATMQEEKYYHEKFPTIYHLRKELADKKEKADLRLVYLALAHIIKFRGHFLIEDDRFDVRNTDIQKQYQAFLEIFDTTFENNHLLSQNVDVEAILTDKISKSAKKDRILAQYPNQKSTGIFAEFLKLIVGNQADFKKHFNLEDKTPLQFAKDSYDEDLENLLGQIGDEFADLFSVAKKLYDSVLLSGILTVTDLSTKAPLSASMIQRYDEHHEDLKHLKQFVKASLPENYREVFADSSKDGYAGYIEGKTNQEAFYKYLLKLLTKQEGSEYFLEKIKNEDFLRKQRTFDNGSIPHQVHLTELRAIIRRQSEYYPFLKENQDRIEKILTFRIPYYVGPLAREKSDFAWMTRKTDDSIRPWNFEDLVDKEKSAEAFIHRMTNNDLYLPEEKVLPKHSLIYEKFTVYNELTKVRFLAEGFKDFQFLNRKQKETIFNSLFKEKRKVTEKDIISFLNKVDGYEGIAIKGIEKQFNASLSTYHDLKKILGKDFLDNTDNELILEDIVQTLTLFEDREMIKKCLDIYKDFFTESQLKKLYRRHYTGWGRLSAKLINGIRNKENQKTILDYLIDDGSANRNFMQLINDDDLSFKPIIDKARTGSHSDNLKEVVGELAGSPAIKKGILQSLKIVDELVKVMGYEPEQIVVEMARENQTTAKGLSRSRQRLTTLRESLANLKSNILEEKKPKYVKDQVENHHLSDDRLFLYYLQNGRDMYTKKALDIDNLSQYDIDHIIPQAFIKDDSIDNRVLVSSAKNRGKSDDVPSIEIVKARKMFWKNLLDAKLMSQRKYDNLTKAERGGLTSDDKARFIQRQLVETRQITKHVARILDERFNNEVDNGKKICKVKIVTLKSNLVSNFRKEFGFYKIREVNDYHHAHDAYLNAVVAKAILTKYPQLEPEFVYGMYRQKKLSKIVHEDKEEKYSEATRKMFFYSNLMNMFKRVVRLADGSIVVRPVIETGRYMGKTAWDKKKHFATVRKVLSYPQNNIVKKTEIQTGGFSKESILAHGNSDKLIPRKTKDIYLDPKKYGGFDSPIVAYSVLVVADIKKGKAQKLKTVTELLGITIMERSRFEKNPSAFLESKGYLNIRDDKLMILPKYSLFELENGRRRLLASAGELQKGNELALPTQFMKFLYLASRYNESKGKPEEIEKKQEFVNQHVSYFDDILQLINDFSKRVILADANLEKINKLYQDNKENIPVDELANNIINLFTFTSLGAPAAFKFFDKIVDRKRYTSTKEVLNSTLIHQSITGLYETRIDLGKLGED

SEQ ID NO: 657 - protein, 1370 aa, Streptococcus agalactiae
  misc_feature (117)..(117): Xaa can be any naturally occurring amino acid
MNKPYSIGLDIGTNSVGWSIITDDYKVPAKKMRVLGNTDKEYIKKNLIGALLFDGGNTAADRRLKRTARRRYTRRRNRILYLQEIFAEEMSKVDDSFFHRLEDSFLVEEDKRGSKYXIFATLQEEKDYHEKFSTIYHLRKELADKKEKADLRLIYIALAHIIKFRGHFLIEDDSFDVRNTDISKQYQDFLEIFNTTFENNDLLSQNVDVEAILTDKISKSAKKDRILAQYPNQKSTGIFAEFLKLIVGNQADFKKYFNLEDKTPLQFAKDSYDEDLENLLGQIGDEFADLFSAAKKLYDSVLLSGILTVIDLSTKAPLSASMIQRYDEHREDLKQLKQFVKASLPEKYQEIFADSSKDGYAGYIEGKTNQEAFYKYLSKLLTKQEDSENFLEKIKNEDFLRKQRTFDNGSIPHQVHLTELKAIIRRQSEYYPFLKENQDRIEKILTFRIPYYIGPLAREKSDFAWMTRKTDDSIRPWNFEDLVDKEKSAEAFIHRMTNNDFYLPEEKVLPKHSLIYEKFTVYNELTKVRYKNEQGETYFFDSNIKQEIFDGVFKEHRKVSKKKLLDFLAKEYEEFRIVDVIGLDKENKAFNASLGTYHDLEKILDKDFLDNPDNESILEDIVQTLTLFEDREMIKKRLENYKDLFTESQLKKLYRRHYTGWGRLSAKLINGIRDKESQKTILDYLIDDGRSNRNFMQLINDDGLSFKSIISKAQAGSHSDNLKEVVGELAGSPAIKKGILQSLKIVDELVKVMGYEPEQIVVEMARENQTTNQGRRNSRQRYKLLDDGVKNLASDLNGNILKEYPTDNQALQNERLFLYYLQNGRDMYTGEALDIDNLSQYDIDHIIPQAFIKDDSIDNRVLVSSAKNRGKSDDVPSLEIVKDCKVFWKKLLDAKLMSQRKYDNLTKAERGGLTSDDKARFIQRQLVETRQITKHVARILDERFNNELDSKGRRIRKVKIVTLKSNLVSNFRKEFGFYKIREVNNYHHAHDAYLNAVVAKAILTKYPQLEPEFVYGDYPKYNSYKTRKSATEKLFFYSNIMNFFKTKVTLADGTVVVKDDIEVNNDTGEIVWDKKKHFATVRKVLSYPQNNIVKKTEIQTGGFSKESILAHGNSDKLIPRKTKDIYLDPKKYGGFDSPIVAYSVLVVADIKKGKAQKLKTVTELLGITIMERSRFEKNPSAFLESKGYLNIRADKLIILPKYSLFELENGRRRLLASAGELQKGNELALPTQFMKFLYLASRYNESKGKPEEIEKKQEFVNQHVSYFDDILQLINDFSKRVILADANLEKINKLYQDNKENISVDELANNIINLFTFTSLGAPAAFKFFDKIVDRKRYTSTKEVLNSTLIHQSITGLYETRIDLGKLGED

SEQ ID NO: 658 - protein, 1370 aa, Streptococcus agalactiae
MNKPYSIGLDIGTNSVGYSVVTDDYKVPAKKMRVLGNTDKEYIKKNLIGALLFDGGNTASDRRLKRTARRRYTRRRNRILYLQEIFAEEMSKVDDSFFHRLEDSFLVEDDKRGSKYPIFATMQEEKDYHEKFPTIYHLRKELADKKEKADLRLVYLALAHIIKFRGHFLIEDDSFDVRNTDIQRQYQAFLEIFDTTFENNHLLSQNIDVEGILTDKISKSAKKDRILAQYPNQKSTGIFAEFLKLIVGNQADFKKHFNLEDKTPLQFAKDSYDEDLENLLGQIGDEFADLFSVAKKLYDSVLLSGILTVTDLSTKAPLSASMIQRYDEHREDLKQLKQFVKASLPEKYQEIFTDSSKDGYAGYIEGKTNQGAFYKYLSKLLTKQEGSEYFLEKIKNEDFLRKQRTFDNGSIPHQVHLTELKAIIRRQSEYYPFLKENLDRIEKILTFRIPYYVGPLAREKSDFAWMTRKTDDSIRPWNFEELVDKEASAEAFIHRMTNNDLYLPEEKVLPKHSLIYEKFTVYNELTKVRYKNEQGETYFFDSNIKQEIFDGVFKEHRKVSKKKLLDFLAKEYEEFRIVDVIGLDKENKAFNASLGTYHDLKKILDKDFLDNPDNESILEDIVQTLTLFEDREMIKKRLENYKDLFTESQLKKLYRRHYTGWGRLSAKLINGIRDKESQKTILDYLISDGRANRNFMQLIHDDGLSFKPIIDKAQAGSHSDNLKEVVGELAGSPAIKKGILQSLKIVDELVKVMGYEPEQVVVEMARENQTTNQGRRNTRQRYKLLEEGVKNLASDLNGNILKEYPTDNQALQNERLFLYYLQNGRDMYTGEALDIDNLSQYDIDHIVPQAFIKDDSIDNRVLVSSAKNRGKSDNVPSIDIVKARKAFWKKLLDAKLMSQRKYDNLTKAERGGLTSDDKARFIQRQLVETRQITKHVARILDERFNNELDSKGRRIRKVKIVTLKSNLVSNFRKEFGFYKIREVNDYHHAHDAYLNAVVAKAILTKYPQLEPEFVYGDYPKYNSYKTRKSATEKLFFYSNIMNFFKTKVTLADGTVVVKDDIEVNNDTGEIVWDKKKHFATVRKVLSYPQVNIVKKTEIQTGGFSKESILAHGNSDKLIPRKTKDIYLDPKKYGGFDSPIVAYSVLVVADIKKGKAQKLKTVTELLGITIMERFRFEKNPSAFLESKGYLNIRDDKLMILPKYSLFELENGRRRLLASAGELQKGNELALPTQYMKFLYLASRYNELKGKPEEIEQKQEFVVQHVSYFDDILQIINDFSNRVILADANLEKINKLYQDNKENISVDELANNIINLFTFTSLGAPAAFKFFDKIVDRKRYTSTKEVLNSTLIHQSITGLYETRIDLGKLGED

SEQ ID NO: 659 - protein, 1370 aa, Streptococcus agalactiae
MNKPYSIGLDIGTNSVGYSVVTDDYKVPAKKMRVLGNTDKEYIKKNLIGALLFDGGNTASDRRLKRTARRRYTRRRNRILYLQEIFAEEMSKVDDSFFHRLEDSFLVEDDKRGSKYPIFATMQEEKDYHEKFPTIYHLRKELADKKEKANLRLVYLALAHIIKFRGHFLIEDDSFDVRNTDIQRQYQAFLEIFDTTFENNHLLSQNIDVEGILTDKISKSAKKDRILAQYPNQKSTGIFAEFLKLIVGNQADFKKHFNLEDKTPLQFAKDSYDEDLENLLGQIGDEFADLFSVAKKLYDSVLLSGILTVTDLSTKAPLSASMIQRYDEHREDLKQLKQFVKASLPEKYQEIFTDSSKDGYAGYIEGKTNQGAFYKYLSKLLTKQEGSEYFLEKIKNEDFLRKQRTFDNGSIPHQVHLTELKAIIRRQSEYYPFLKENLDRIEKILTFRIPYYVGPLAREKSDFAWMTRKTDDSIRPWNFEELVDKEASAEAFIHRMTNNDLYLPEEKVLPKHSLIYEKFTVYNELTKVRYKNEQGETYFFDSNIKQEIFDGVFKEHRKVSKKKLLDFLAKEYEEFRIVDVIGLDKENKAFNASLGTYHDLKKILDKDFLDNPDNESILEDIVQTLTLFEDREMIKKRLENYKDLFTESQLKKLYRRHYTGWGRLSAKLINGIRDKESQKTILDYLISDGRANRNFMQLIHDDGLSFKPIIDKAQAGSHSDNLKEVVGELAGSPAIKKGILQSLKIVDELVKVMGYEPEQVVVEMARENQTTNQGRRNTRQRYKLLEEGVKNLASDLNGNILKEYPTDNQALQNERLFLYYLQNGRDMYTGEALDIDNLSQYDIDHIVPQAFIKDDSIDNRVLVSSAKNRGKSDNVPSIDIVKARKAFWKKLLDAKLMSQRKYDNLTKAERGGLTSDDKARFIQRQLVETRQITKHVARILDERFNNELDSKGRRIRKVKIVTLKSNLVSNFRKEFGFYKIREVNDYHHAHDAYLNAVVAKAILTKYPQLEPEFVYGDYPKYNSYKTRKSATEKLFFYSNIMNFFKTKVTLADGTVVVKDDIEVNNDTGEIVWDKKKHFATVRKVLSYPQVNIVKKTEIQTGGFSKESILAHGNSDKLIPRKTKDIYLDPKKYGGFDSPIVAYSVLVVADIKKGKAQKLKTVTELLGITIMERFRFEKNPSAFLESKGYLNIRDDKLMILPKYSLFELENGRRRLLASAGELQKGNELALPTQYMKFLYLASRYNELKGKPEEIEQKQEFVVQHVSYFDDILQIINDFSNRVILADANLEKINKLYQDNKENISVDELANNIINLFTFTSLGAPAAFKFFDKIVDRKRYTSTKEVLNSTLIHQSITGLYETRIDLGKLGED

SEQ ID NO: 660 - protein, 1370 aa, Streptococcus agalactiae
  misc_feature (9)..(9): Xaa can be any naturally occurring amino acid
MNKPYSIGXDIGTNSVGWSIITDDYKVPAKKMRVLGNTDKEYIKKNLIGALLFDGGNTAADRRLKRTARRRYTRRRNRILYLQEIFAEEMSKVDDSFFHRLEDSFLVEEDKRGSKYPIFATLQEEKDYHEKFSTIYHLRKELADKKEKADLRLIYIALAHIIKFRGHFLIEDDSFDVRNTDISKQYQDFLEIFNTTFENNDLLSQNVDVEAILTDKISKSAKKDRILAQYPNQKSTGIFAEFLKLIVGNQADFKKYFNLEDKTPLQFAKDSYDEDLENLLGQIGDEFADLFSAAKKLYDSVLLSGILTVIDLSTKAPLSASMIQRYDEHREDLKQLKQFVKASLPEKYQEIFADSSKDGYAGYIEGKTNQEAFYKYLSKLLTKQEDSENFLEKIKNEDFLRKQRTFDNGSIPHQVHLTELKAIIRRQSEYYPFLKENQDRIEKILTFRIPYYIGPLAREKSDFAWMTRKTDDSIRPWNFEDLVDKEKSAEAFIHRMTNNDFYLPEEKVLPKHSLIYEKFTVYNELTKVRYKNEQGETYFFDSNIKQEIFDGVFKEHRKVSKKKLLDFLAKEYEEFRIVDVIGLDKENKAFNASLGTYHDLEKILDKDFLDNPDNESILEDIVQTLTLFEDREMIKKRLENYKDLFTESQLKKLYRRHYTGWGRLSAKLINGIRDKESQKTILDYLIDDGRSNRNFMQLINDDGLSFKSIISKAQAGSHSDNLKEVVGELAGSPAIKKGILQSLKIVDELVKVMGYEPEQIVVEMARENQTTNQGRRNSRQRYKLLDDGVKNLASDLNGNILKEYPTDNQALQNERLFLYYLQNGRDMYTGEALDIDNLSQYDIDHIIPQAFIKDDSIDNRVLVSSAKNRGKSDDVPSLEIVKDCKVFWKKLLDAKLMSQRKYDNLTKAERGGLTSDDKARFIQRQLVETRQITKHVARILDERFNNELDSKGRRIRKVKIVTLKSNLVSNFRKEFGFYKIREVNNYHHAHDAYLNAVVAKAILTKYPQLEPEFVYGDYPKYNSYKTRKSATEKLFFYSNIMNFFKTKVTLADGTVVVKDDIEVNNDTGEIVWDKKKHFATVRKVLSYPQNNIVKKTEIQTGGFSKESILAHGNSDKLIPRKTKDIYLDPKKYGGFDSPIVAYSVLVVADIKKGKAQKLKTVTELLGITIMERSRFEKNPSAFLESKGYLNIRADKLIILPKYSLFELENGRRRLLASAGELQKGNELALPTQFMKFLYLASRYNESKGKPEEIEKKQEFVNQHVSYFDDILQLINDFSKRVILADANLEKINKLYQDNKENISVDELANNIINLFTFTSLGAPAAFKFFDKIVDRKRYTSTKEVLNSTLIHQSITGLYETRIDLGKLGED

SEQ ID NO: 661 - protein, 1125 aa, Streptococcus anginosus
MNGLVLGLDIGIASVGVGILNKETGEIIHANSRIFPAATADSNVERRGFRQGRRLGRRKKHRSARLNNLFEEFGFITDFSAIPLNLNPYALRVKGLSEELTNEELFIALKNIIKRRGISYLDDASEDGETASNEYGKAVEENRKLLADKTPGQIQLERFEKYGQVRGDFTVVENGENHRLINVFSTSAYKKEAERILRRQQEFNVRISDEFIEAYLTILTGKRKYYHGPGNEKSRTDYGRFRTDGTTLDNIFGILIGKCTFYPDEYRAAKASYTAQEFNLLNDLNNLTVPTETKKLSPEQKRQIVEYARTAKTLGTPTLLKYIAKLVDGSIDDIKGYRIDKSDKPEMHTFDAYRKMRTLDLVNIDALSRETLDDLAHILTLNTESEGILEALNSKMPSTFTKEQIDELIQFRKKNSAVFGKGWHNFSLKLMNELISELYETSEEQMTILTRLGKQRSREISKRTKYIDEKELTEEIYNPVVAKSVRQAIKIINEATKRYGIFDNIVIEMARENNEEDAKKDYIKRQKANQDEKNASMEKAAFQYNGKKELPDSIFHGHKELATKIRLWHQQGERCLYTGKNISIRDLIHNPHQYEIDHILPLSLSFDDGLANKVLVLATANQEKGQRTPFQAIDSMDDAWSYREFKQYVRNSKSLSNKKKDYLLTEEDISKIEVKQKFIERNLVDTRYSSRVVLNTLQEFYKTNDFDTKISVVRGQFTSQLRRKWKIEKSRDTYHHHAVDALIIAASSQLRLWKKQNNPLISYKEGQFVDPETGEILSLTDDEYKELVFRPPYDYFVDTLKSKSFEDSILFSYQVDSKYNRKISDATIYGTRKAQLGKDKQEETYVLGKIKDIYSQKGYEDFIKRYNKDETQFLIYHKDPQTFEKVIEEILKTYPDKELNEKGKEIPCNPFEKYRQENGPIRKYSKKGKGPEIKSLKYYDNKLGNHIDITPVNSQNQVVLQSLKPWRTDVYFNPRTSKYELMGLKYSDLRFEKGSGSYGISPEKYNKVKAKEGVNEDSEFKFTLYKNDLILIKDTETGEQQLFRYGSRNDTSKHYVELKPYEKAKFEGNQQLMNLLGTVAKGGQCLKGINKPNLSIYKVKTDVLGNKYFIKKEGDQPQLNFKKKF

SEQ ID NO: 662 - protein, 1386 aa, Streptococcus anginosus
MNQKYSIGLDIGTNSVGWAVITDDYKVPAKKMKVLGNTDKQSIKKNLLGALLFDSGETAEATRLKRTARRRYTRRRNRLRYLQEIFAEEMMQVDESFFQRLDDSFLVDEDKRGERHPIFGNIAAEVKYHDEFPTIYHLRKHLADISQKADLRLVYLALAHMIKFRGHFLIEGQLKAENTNVQALFKDFVEVYDKTVEESHLSEITVDALSILTEKVSKSRRLENLIAHYPAEKKNTLFGNLIALFLGLQPNFKTNFQLSEDAKLQFSKDTYEEDLEGLLGEVGDEYADLFASAKNLYDAILLSGILTVDDNSTKAPLSASMVKRYEEHQKDLKKFEDFIKVNALDQYNAIFKDKNKKGYAGYIESGVKQDEFYKYLKGILLQINGSGDFLDKIDREDFLRKQRTFDNGSIPHQIHLQEMHAILRRQGEHYPFLKENQDKIEKILTFRIPYYVGPLARKGSRFAWAEYKADEKITPWNFDDILDKEKSAEKFITRMTLNDLYLPEEKVLPKHSLLYETFTVYNELTKVKYVNEQGEAKFFDANMKQEIFDHVFKENRKVTKDKLLNYLNKEFEEFRIVNLTGLDKENKVFNSSLGTYHDLRKILNKSFLDNKENAQIIEDIIQTLTLFEDREMIRQRLQKYSDIFTKAQLKKLERRHYTGWGRLSYKLINGIRNKENKKTILDYLIDDGYANRNFMQLINDDALSFKEEIAKAQIIGDVDDIANVVHDLPGSPAIKKGILQSVKIVDELVKVMGHNPANIIIEMARENQTTDRGRRNSQQRLKLLQDSLKNLDNPVNIKNVENQQLQNDRLFLYYIQNGKDMYTGETLDINNLSQYDIDHIIPQAYIKDDSFDNRVLTSSSENRGKSDNVPSIEVVCARKADWMRLRKAGLISQRKFDNLTKAERGGLTENDKAGFIKRQLVETRQITKHVAQVLDARFNAKHDENKKVIRDVKIITLKSNLVSQFRKDFKFYKVREINDYHHAHDAYLNAVIGTALLKKYPKLASEFVYGEFKKYDVRKFIAKSDKEIGKATAKYFFYSNLMNFFKKEVKFADGTVVERPDIETSEDGEIAWNKQTDFKIVRKVLSYPQVNIVKKTEVQTHGLDRGKPRGLFNANPSPKPKPDSSENLVGVKRNLDPKKYGGYAGISNSYAVLVKAIIEKGVKKKETMVLEFQGISILDRITFEKDKRAFLLGKGYKDIKKIIELPKYSLFELKDGSRRMLASILSTNNKRGEIHKGNELFVPQKFTTLLYHAKRINNPINKDHIEYVKKHRDDFKELLNYVLEFNEKYVGATKNGERLKEAVADFDSKSNEEICTSFLGAVNSKNAGLFELTSLGSASDFEFLGVKIPRYRDYTPSSLLKDSTLIHQSITGLYETRIDLSKLGED

SEQ ID NO: 663 - protein, 1396 aa, Streptococcus anginosus
MTKPYSIGLDIGTNSVGWAVITDDYKVPAKKMKVLGNTNRDYIKKNLLGALLFDGGETAEGRRLKRTARRRYTRRKNRLRYLQEIFAEEMMQVDESFFQRLDDSFLVEEDKQGSKYPIFGTLKEEKEYHKKFKTIYHLREELANSKEKADLRLVYLALAHMIKFRGHFLYEGDLKAENTDVQALFKDFVEEYDKTIEESHLSEITVDALSILTEKVSKSSRLENLIAHYPTEKKNTLFGNLIALSLGLQANFKTNFQLSEDAKLQFSKDTYEEDLEGLLGEVGDEYADLFVSAKNLYDAILLSGILTVDDNSTKAPLSASMVKRYKEHKEELAAFKRFIKEKLPKKYEEIFKDDTKNGYAGYVGADKKLRKRSGKLATEEEFYKYVKGILNKVEGADYFLDKIDREDFLRKQRTFDNGSIPHQIHLQEMHAILRRQGEHYPFLKENQDKIEKILTFRIPYYVGPLARKGSRFAWAEYKADEKITPWNFDDILDKEKSAEKFITRMTLNDLYLPEEKVLPKHSPLYETFTVYNELTKVKYVNEQGEAKFFDTNMKQEIFDHVFKENRKVTKDKLLNYLNKEFEEFRIVNLTGLDKENKAFNASLGTYHDLRKILDKSFLDDKVNEKIIEDIIQTLTLFEDREMIRQRLQKYSDIFTTQQLKELERRHYTGWGRLSYKLINGIRNKENKKTILDYLIDDGYANRNFMQLINDDALSFKEEIARAQIIGDVDDIANVVHDLPGSPAIKKGILQSVKIVDELVKVMGHNPTNIIIEMARENQTTDKGRRNSQQRLKLLQDSLKNLDNPVNIKNVENQQLQNDRLFLYYIQNGKDMYTGETLDINNLSQYDIDHIIPQAFIKDNSLDNRVLTRSDKNRGKSDDVPSIEVVHEMKSFWSKLLSVKLITQRKFDNLTKAERGGLTENDKAGFIKRQLVETRQITKHVAQVLDARFNAKHDENKKVIRDVKIITLKSNLVSQFRKDFKFYKVREINDYHHAHDAYLNAVIGTALLKKYPKLASEFVYGEFKKYDVRKFIAKSDKEIGKATAKYFFYSNLMNFFKKEVKFADGTVVERPDIETSEDGEIAWNKQTDFKIVRKVLSYPQVNIVKKTEVQTHGLDRGKPRGLFNANPSPKPKPDSSENLVGIKRNLDPKKYGGYAGISNSYAVLVKAIIEKGVKKKETMVLEFQGISILDRITFEKDKRAFLLGKGYKDIKKIIELPKYSLFELKDGSRRMLASILSTNNKRGEIHKGNELFVPQKFTTLLYHAKRINNPINKDHIEYVKKHRDDFKELLNYVLEFNEKYVGATKNGERLKEAVADFDSKSNEEICTSFLGAVNSKNAGLFELTSLGSASDFEFLGVKIPRYRDYTPSSLLKDSILIHQSITGLYETRIDLSKLGED

SEQ ID NO: 664 - protein, 1375 aa, Streptococcus canis
MEKKYSIGLDIGTNSVGWAVITDDYKVPSKKFKVLGNTNRKSIKKNLMGALLFDSGETAEATRLKRTARRRYTRRKNRIRYLQEIFANEMAKLDDSFFQRLEESFLVEEDKKNERHPIFGNLADEVAYHRNYPTIYHLRKKLADSPEKADLRLIYLALAHIIKFRGHFLIEGKLNAENSDVAKLFYQLIQTYNQLFEESPLDEIEVDAKGILSARLSKSKRLEKLIAVFPNEKKNGLFGNIIALALGLTPNFKSNFDLTEDAKLQLSKDTYDDDLDELLGQIGDQYADLFSAAKNLSDAILLSDILRSNSEVTKAPLSASMVKRYDEHHQDLALLKTLVRQQFPEKYAEIFKDDTKNGYAGYVGIGIKHRKRTTKLATQEEFYKFIKPILEKMDGAEELLAKLNRDDLLRKQRTFDNGSIPHQIHLKELHAILRRQEEFYPFLKENREKIEKILTFRIPYYVGPLARGNSRFAWLTRKSEEAITPWNFEEVVDKGASAQSFIERMTNFDEQLPNKKVLPKHSLLYEYFTVYNELTKVKYVTERMRKPEFLSGEQKKAIVDLLFKTNRKVTVKQLKEDYFKKIECFDSVEIIGVEDRFNASLGTYHDLLKIIKDKDFLDNEENEDILEDIVLTLTLFEDREMIEERLKTYAHLFDDKVMKQLKRRHYTGWGRLSRKMINGIRDKQSGKTILDFLKSDGFSNRNFMQLIHDDSLTFKEEIEKAQVSGQGDSLHEQIADLAGSPAIKKGILQTVKIVDELVKVMGHKPENIVIEMARENQTTTKGLQQSRERKKRIEEGIKELESQILKENPVENTQLQNEKLYLYYLQNGRDMYVDQELDINRLSDYDVDHIVPQSFIKDDSIDNKVLTRSVENRGKSDNVPSEEVVKKMKNYWRQLLNAKLITQRKFDNLTKAERGGLSEADKAGFIKRQLVETRQITKHVARILDSRMNTKRDKNDKPIREVKVITLKSKLVSDFRKDFQLYKVRDINNYHHAHDAYLNAVVGTALIKKYPKLESEFVYGDYKVYDVRKMIAKSEQEIGKATAKRFFYSNIMNFFKTEVKLANGEIRKRPLIETNGETGEVVWNKEKDFATVRKVLAMPQVNIVKKTEVQTGGFSKESILSKRESAKLIPRKKGWDTRKYGGFGSPTVAYSILVVAKVEKGKAKKLKSVKVLVGITIMEKGSYEKDPIGFLEAKGYKDIKKELIFKLPKYSLFELENGRRRMLASATELQKANELVLPQHLVRLLYYTQNISATTGSNNLGYIEQHREEFKEIFEKIIDFSEKYILKNKVNSNLKSSFDEQFAVSDSILLSNSFVSLLKYTSFGASGGFTFLDLDVKQGRLRYQTVTEVLDATLIYQSITGLYETRTDLSQLGGD

SEQ ID NO: 665 - protein, 1345 aa, Streptococcus constellatus
MGKPYSIGLDIGTNSVGWAVVTDDYKVPAKKMKVLGNTDKQSIKKNLLGALLFDSGETAEATRLKRTARRRYTRRKNRLRYLQEIFTGEMNKVDENFFQRLDDSFLVDEDKRGEHHPIFGNIAAEVKYHDDFPTIYHLRRHLADTSKKADLRLVYLALAHMIKFRGHFLYEGDLKAENTDVQALFKDFVEEYDKTIEESHLSEITVDALSILTEKVSKSSRLENLIAHYPTEKKNTLFGNLIALSLDLHPNFKTNFQLSEDAKLQFSKDTYEEDLEGFLGEVGDEYADLFASAKNLYDAILLSGILTVDDNSTKAPLSASMVKRYEEHQKDLKKLKDFIKVNAPDQYNAIFKDKNKKGYASYIESGVKQDEFYKYLKGILLKINGSGDFLDKIDREDFLRKQRTFDNGSIPHQIHLQEMHAILRRQGEHYPFLKENQDKIEKILTFRIPYYVGPLARKGSRFAWAEYKADEKITPWNFDDILDKEKSAEKFITRMTLNDLYLPEEKVLPKHSPLYEAFTVYNELTKVKYVNEQGEAKFFDTNMKQEIFDHVFKENRKVTKDKLLNYLNKEFEEFRIVNLTGLDKENKAFNSSLGTYHDLRKILDKSFLDDKANEKTIEDIIQTLTLFEDREMIRQRLQKYSDIFTKAQLKKLERRHYTGWGRLSYKLINGIRNKENKKTILDYLIDDGYANRNFMQLINDDALSFKEEIARAQIIDDVDDIANVVHDLPGSPAIKKGILQSVKIVDELVKVMGHNPANIIIEMARENQTTDKGRRNSQQRLKLLQDSLKNLDNPVNIKNVENQQLQNDRLFLYYIQNGKDMYTGETLDINNLSQYDIDHIIPQAFIKDNSLDNRVLTRSDKNRGKSDDVPSIEVVHEMKSFWSKLLSVKLITQRKFDNLTKAERGGLTEEDKAGFIKRQLVETRQITKHVAQILDERFNTEFDGNKRRIRNVKIITLKSNLVSNFRKEFELYKVREINDYHHAHDAYLNAVVGNALLLKYPQLEPEFVYGEYPKYNSYRSRKSATEKFLFYSNILRFFKKEDIQTNEDGEIAWNKEKHIKILRKVLSYPQVNIVKKTEEQTGGFSKESILPKGESDKLIPRKTKNSYWDPKKYGGFDSPVVAYSILVFADVEKGKSKKLRKVQDMVGITIMEKKRFEKNPVDFLEQRGYRNVRLEKIIKLPKYSLFELENKRRRLLASAKELQKGNELVIPQRFTTLLYHSYRIEKDYEPEHREYVEKHKDEFKELLEYISVFSRKYVLADNNLTKIEMLFSKNKDAEVSSLAKSFISLLTFTAFGAPAAFNFFGENIDRKRYTSVTECLNATLIHQSITGLYETRIDLSKLGED

SEQ ID NO: 666 - protein, 538 aa, Streptococcus dysgalactiae
DYDVDHIVPQSFIKDDSIDNKVLTRSDKNRGKSDNVPSEEVVKKMKNYWRQLLNAKLITQRKFDNLTKAERGGLSELDKAGFIKRQLVETRQITKHVAQILDSRMNTKYDENDKLIREVKVITLKSKLVSDFRKDFQFYKVREINNYHHAHDAYLNAVVGTALIKKYPKLESEFVYGDYKVYDVRKMIAKSEQEIGKATAKRFFYSNIMNFFKTEITLANGEIRKRPLIETNEETGEIVWDKGRDFATVRKVLSMPQVNIVKKTEVQTGALTNESIYARGSFDKLISRKHRFESSKYGGFGSPTVTYSVLVVAKSKVQDGKVKKIKTGKELIGITLLDKLVFEKNPLKFIEDKGYGNVQIDKCIRLPKYSLFEFENGTRRMLASVMANNNSRGDLQKANEMFLPAKLVTLLYHAHKIESSKELEHEAYILDHYNDLYQLLSYIERFASLYVDVEKNISKVKELFSNIESYSISEICSSVINLLTLTASGAPADFKFLGTTIPRKRYGSPQSILSSTLIHQSITGLYETRIDLSQLGGD

SEQ ID NO: 667 - protein, 1155 aa, Streptococcus dysgalactiae
MDKKYSIGLDIGTNSVGWAVITDDYKVPSKKFKVLGNTDRHSIKKNLIGALLFDSGETAEATRLKRSARRRYTRRKNRIRYLQEIFSSEMSKVDDSFFHRLEESFLVEEDKKHERHPIFGNIVDEVAYHEKYPTIYHLRKKLADSTDKADLRLIYLALAHMIKFRGHFLIEGDLNPDNSDMDKLFIQLVQTYNQLFEENPINASRVDAKAILSARLSKSRRLENLIAQLPGEKRNGLFGNLIALSLGLTPNFKSNFDLAEDAKLQLSKDTYDDDLDNLLAQIGDQYADLFLAAKNLSDAILLSDILRVNSEITKAPLSASMIKRYDEHHQDLTLLKALVRQQLPEKYKEIFFDQSKNGYAGYIDGGASQEEFYKFIKPILEKMDGTEELLAKLNREDLLRKQRTFDNGSIPHQIHLGELHAILRRQEDFYPFLKDNREKIEKILTFRIPYYVGPLARGNSRFAWMTRKSEETITPWNFEEVVDKGASAQSFIERMTNFDKNLPNEKVLPKHSLLYEYFTVYNELTKVKYVTEGMRKPEFLSGKQKEAIVDLLFKTNRKVTVKQLKEDYFKKIECFDSVEISGVEDRFNASLGTYHDLLKIIKDKDFLDNEENEDILEDIVLTLTLFEDKEMIEERLKTYAHLFDDKVMKQLKRRHYTGWGRLSRKLINGIRDKQSGKTILDFLKSDGFANRNFIQLIHDDSLTFKEAIQKAQVSGQGHSLHEQIANLAGSPAIKKGILQSVKVVDELVKVMGHKPENIVIEMARENQTTQKGQKNSRERMKRIEEGIKELGSQILKEHPVENTQLQNEKLYLYYLQNRRDMYVDQELDINRLSDYDVDHIVPQSFIKDDSIDNKVLTRSDKNRGKSDDVPSEEVVKKMKNYWRQLLNAKLITQRKFDNLTKAERGGLSELDKAGFIKRQLVETRQITKHVAQILDSRMNTKYDENDKLIREVKVITLKSKLVSDFRKDFQFYKVREINNYHHAHDAYLNAVVGTALIKKYPKLESEFVYGDYKVYDVRKMIAKSEQEIGKATAKRFFYSNIMNFFKTEITLANGEIRKRPLIETNEETGEIVWDKGRDFATVRKVLSMPQVNIVKKTEVQTGALTNESIYARGSFDKLISRKHRFESSKYGGFGSPTVTYSVLVVAKYQSYKMEK

SEQ ID NO: 668 - protein, 1371 aa, Streptococcus dysgalactiae
MDKKYSIGLDIGTNSVGWAVITDDYKVPSKKFKVLGNTDRHSIKKNLIGALLFDSGETAEATRLKRTARRRYTRRKNRIRYLQEIFSSEMSKVDDSFFHRLEESFLVEEDKKHERHPIFGNIVDEVAYHEKYPTIYHLRKKLADSTDKADLRLIYLALAHMIKFRGHFLIEGDLNPDNSDMDKLFIQLVQTYNQLFEENPINASRVDAKAILSARLSKSRRLENLIAQLPGEKRNGLFGNLIALSLGLTPNFKSNFDLAEDAKLQLSKDTYDDDLDNLLAQIGDQYADLFLAAKNLSDAILLSDILRVNSEITKAPLSASMIKRYDEHHQDLTLLKALVRQQLPEKYKEIFFDQSKNGYAGYIDGGASQEEFYKFIKPILEKMDGTEELLAKLNREDLLRKQRTFDNGSIPHQIHLGELHAILRRQEDFYPFLKDNREKIEKILTFRIPYYVGPLARGNSRFAWMTRKSEETITPWNFEEVVDKGASAQSFIERMTNFDKNLPNEKVLPKHSLLYEYFTVYNELTKVKYVTEGMRKPEFLSGKQKEAIVDLLFKTNRKVTVKQLKEDYFKKIECFDSVEISGVEDRFNASLGTYHDLLKIIKDKDFLDNEENEDILEDIVLTLTLFEDKEMIEERLKTYAHLFDDKVMKQLKRRHYTGWGRLSRKLINGIRDKQSGKTILDFLKSDGFANRNFIQLIHDDSLTFKEAIQKAQVSGQGHSLHEQIANLAGSPAIKKGILQSVKVVDELVKVMGHKPENIVIEMARENQTTQKGQKNSRERMKRIEEGIKELGSQILKEHPVENTQLQNEKLYLYYLQNGRDMYVDQELDINRLSDYDVDHIVPQSFIKDDSIDNKVLTRSDKNRGKSDDVPSEEVVKKMKNYWRQLLNAKLITQRKFDNLTKAERGGLSELDKAGFIKRQLVETRQITKHVAQILDSRMNTKYDENDKLIREVKVITLKSKLVSDFRKDFQFYKVREINNYHHAHDAYLNAVVGTALIKKYPKLESEFVYGDYKVYDVRKMIAKSEQEIGKATAKRFFYSNIMNFFKTEITLANGEIRKRPLIETNEETGEIVWNKGRDFATVRKVLSMPQVNIVKKTEVQTGALTNESIYARGSFDKLISRKHRFESSKYGGFGSPTVTYSVLVVAKSKVQDGKVKKIKTGKELIGITLLDKLVFEKNPLKFIEDKGYGNVQIDKCIKLPKYSLFEFENGTRRMLASVMANNNSRGDLQKANEMFLPAKLVTLLYHAHKIESSKELEHEAYILDHYNDLYQLLSYIERFASLYVDVEKNISKVKELFSNIESYSISEICSSVINLLTLTASGAPADFKFLGTTIPRKRYGSPQSILSSTLIHQSITGLYETRIDLSQLGGD

SEQ ID NO: 669 - protein, 1371 aa, Streptococcus dysgalactiae
MDKKYSIGLDIGTNSVGWAVITDDYKVPSKKFKVLGNTDRHSIKKNLIGALLFDSGETAEATRLKRTARRRYTRRKNRIRYLQEIFSSEMSKVDDSFFHRLEESFLVEEDKKHERHPIFGNIVDEVAYHEKYPTIYHLRKKLADSTDKADLRLIYLALAHMIKFRGHFLIEGDLNPDNSDMDKLFIQLVQTYNQLFEENPINASRVDAKAILSARLSKSRRLENLIAQLPGEKRNGLFGNLIALSLGLTPNFKSNFDLAEDAKLQLSKDTYDDDLDNLLAQIGDQYADLFLAAKNLSDAILLSDILRVNSEITKAPLSASMIKRYDEHHQDLTLLKALVRQQLPEKYKEIFFDQSKNGYAGYIDGGASQEEFYKFIKPILEKMDGTEELLAKLNREDLLRKQRTFDNGSIPHQIHLGELHAILRRQEDFYPFLKDNREKIEKILTFRIPYYVGPLARGNSRFAWMTRKSEETITPWNFEEVVDKGASAQSFIERMTNFDKNLPNEKVLPKHSLLYEYFTVYNELTKVKYVTEGMRKPEFLSGKQKEAIVDLLFKTNRKVTVKQLKEDYFKKIECFDSVEISGVEDRFNASLGTYHDLLKIIKDKDFLDNEENEDILEDIVLTLTLFEDKEMIEERLKKYANLFDDKVMKQLKRRHYTGWGRLSRKLINGIRDKQSGKTILDFLKSDGFANRNFMQLINDDSLTFKEAIQKAQVSGQGHSLHEQIANLAGSPAIKKGILQSVKVVDELVKVMGHKPENIVIEMARENQTTQKGQKNSRERMKRIEEGIKELGSQILKEHPVENTQLQNEKLYLYYLQNGRDMYVDQELDINRLSDYDVDHIVPQSFIKDDSIDNKVLTRSDKNRGKSDNVPSEEVVKKMKNYWRQLLNAKLITQRKFDNLTKAERGGLSELDKAGFIKRQLVETRQITKHVAQILDSRMNTKYDENDKLIREVKVITLKSKLVSDFRKDFQFYKVREINNYHHAHDAYLNAVVGTALIKKYPKLESEFVYGDYKVYDVRKMIAKSEQEIGKATAKRFFYSNIMNFFKTEITLANGEIRKRPLIETNEETGEIVWDKGRDFATVRKVLSMPQVNIVKKTEVQTGALTNESIYARGSFDKLISRKHRFESSKYGGFGSPTVTYSVLVVAKSKVQDGKVKKIKTGKELIGITLLDKLVFEKNPLKFIEDKGYGNVQIDKCIKLPKYSLFEFENGTRRMLASVMANNNSRGDLQKANEMFLPAKLVTLLYHAHKIESSKELEHEAYILDHYNDLYQLLSYIERFASLYVDVEKNISKVKELFSNIESYSISEICSSVINLLTLTASGAPADFKFLGTTIPRKRYGSPQSILSSTLIHQSITGLYETRIDLSQLGGD

SEQ ID NO: 670 - protein, 1371 aa, Streptococcus dysgalactiae
MDKKYSIGLDIGTNSVGWAVITDDYKVPSKKFKVLGNTDRHSIKKNLIGALLFDSGETAEATRLKRTARRRYTRRKNRIRYLQEIFSSEMSKVDDSFFHRLEESFLVEEDKKHERHPIFGNIVDEVAYHEKYPTIYHLRKKLADSTDKADLRLIYLALAHMIKFRGHFLIEGDLNPDNSDVDKLFIQLVQTYNQLFEEKPINASGVDAKAILSARLSKSKRLENLIAQLPGEKKNGLFGNLIALSLGLTPNFKSNFDLAEDAKLQLSKDTYDDDLDNLLAQIGNQYADLFLAAKNLSDAILLSDILRVNSEITKAPLSASMIKRYDEHHQDLTLLKALVRQQLPEKYKEIFFDQSKNGYAGYIDGGASQEEFYKFIKPILEKMDGTEELLAKLNREDLLRKQRTFDNGSIPHQIHLGELHAILRRQEDFYPFLKDNREKIEKILTFRIPYYVGPLARGNSRFAWMTRKSEETITPWNFEEVVDKGASAQSFIERMTNFDKNLPNEKVLPKHSLLYEYFTVYNELTKVKYVTEGMRKPEFLSGKQKEAIVDLLFKTNRKVTVKQLKEDYFKKIECFDSVEISGVEDRFNASLGTYHDLLKIIKDKDFLDNEENEDILEDIVLTLTLFEDKEMIEERLKKYANLFDDKVMKQLKRRHYTGWGRLSRKLINGIRDKQSGKTILDFLKSDGFANRNFMQLINDDSLTFKEAIQKAQVSGQGHSLHEQIANLAGSPAIKKGILQSVKVVDELVKVMGHKPENIVIEMARENQTTQKGQKNSRERMKRIEEGIKELGSQILKEHPVENTQLQNEKLYLYYLQNGRDMYVDQELDINRLSDYDVDHIVPQSFIKDDSIDNKVLTRSDKNRGKSDNVPSEEVVKKMKNYWRQLLNAKLITQRKFDNLTKAERGGLSELDKAGFIKRQLVETRQITKHVAQILDSRMNTKYDENDKLIREVKVITLKSKLVSDFRKDFQFYKVREINNYHHAHDAYLNAVVGTALIKKYPKLESEFVYGDYKVYDVRKMIAKSEQEIGKATAKRFFYSNIMNFFKTEITLANGEIRKRPLIETNEETGEIVWDKGRDFATVRKVLSMPQVNIVKKTEVQTGALTNESIYARGSFDKLISRKHRFESSKYGGFGSPTVTYSVLVVAKSKVQDGKVKKIKTGKELIGITLLDKLVFEKNPLKFIEDKGYGNVQIDKCIKLPKYSLFEFENGTRRMLASVMANNNSRGDLQKANEMFLPAKLVTLLYHAHKIESSKELEHEAYILDHYNDLYQLLSYIERFASLYVDVEKNISKVKELFSNIESYSISEICSSVINLLTLTASGAPADFKFLGTTIPRKRYGSPQSILSSTLIHQSITGLYETRIDLSQLGGD

SEQ ID NO: 671 - protein, 1370 aa, Streptococcus gallolyticus; identical to SEQ ID NO: 219

SEQ ID NO: 672 - protein, 1375 aa, Streptococcus infantarius
MEKSYSIGLDIGTNSVGWAVITDDYKVPAKKMKVLGNTDKKYIKKNLLGALLFDSGETAEVTRLKRTARRRYTRRKNRLRYLQEIFAKEMTKVDESFFQRLEESFLTDDDKTFDSHPIFGNKAEEDAYHQKFPTIYHLRKYLADSQEKADLRLVYLALAHMIKYRGHFLIEGELNAENTDVQKLFNVFVETYDKIVDESHLSEIEVDASSILTEKVSKSRRLENLIKQYPTEKKNTLFGNLIALALGLQPNFKTNFKLSEDAKLQFSKDTYEEDLEELLGKVGDDYADLFISAKNLYDAILLSGILTVDDNSTKAPLSASMIKRYVEHHEDLEKLKEFIKINKLKLYHDIFKDKTKNGYAGYIDNGVKQDEFYKYLKTILTKIDDSDYFLDKIERDDFLRKQRTFDNGSIPHQIHLQEMHSILRRQGDYYPFLKENQAKIEKILTFRIPYYVGPLARKDSRFAWANYHSDEPITPWNFDEVVDKEKSAEKFITRMTLNDLYLPEEKVLPKHSHVYETFTVYNELTKIKYVNEQGESFFFDANMKQEIFDHVFKENRKVTKAKLLSYLNNEFEEFRINDLIGLDKDSKSFNASLGTYHDLKKILDKSFLDDKTNGQIIEDIVLTLTLFEDRDMIHERLQKYSDFFTSQQLKKLERRHYTGWGRLSYKLINGIRNKENNKTILDFLIDDGHANRNFMQLINDESLSFKTIIQEAQVVGDVDDIEAVVHDLPGSPAIKKGILQSVKIVDELVKVMGDNPDNIVIEMARENQTTGYGRNKSNQRLKRLQDSLKEFGSDILSKKKPSYVDSKVENSHLQNDRLFLYYIQNGKDMYTGEELDIDRLSDYDIDHIIPQAFIKDNSIDNKVLTSSAKNRGKSDDVPSIEIVRNRRSYWYKLYKSGLISKRKFDNLTKAERGGLTEADKAGFIKRQLVETRQITKHVAQILDARFNTKRDENDKVIRDVKVITLKSNLVSQFRKEFKFYKVREINDYHHAHDAYLNAVVGTALLKKYPKLTPEFVYGEYKKYDVRKLIAKSSDDYSEMGKATAKYFFYSNLMNFFKTEVKYADGRVFERPDIETNADGEVVWNKQKDFDIVRKVLSYPQVNIVKKVEAQTGGFSKESILSKGDSDKLIPRKTKKVYWNTKKYGGFDSPTVAYSVLVVADIEKGKAKKLKTVKELVGISIMERSFFEENPVSFLEKKGYHNVQEDKLIKLPKYSLFEFEGGRRRLLASATELQKGNEVMLPAHLVELLYHAHRIDSFNSTEHLKYVSEHKKEFEKVLSCVENFSNLYVDVEKNLSKVRAAAESMTNFSLEEISASFINLLTLTALGAPADFNFLGEKIPRKRYTSTKECLSATLIHQSVTGLYETRIDLSKLGEE

SEQ ID NO: 673 - protein, 1368 aa, Streptococcus iniae
MRKPYSIGLDIGTNSVGWAVITDDYKVPSKKMRIQGTTDRTSIKKNLIGALLFDNGETAEATRLKRTTRRRYTRRKYRIKELQKIFSSEMNELDIAFFPRLSESFLVSDDKEFENHPIFGNLKDEITYHNDYPTIYHLRQTLADSDQKADLRLIYLALAHIIKFRGHFLIEGNLDSENTDVHVLFLNLVNIYNNLFEEDIVETASIDAEKILTSKTSKSRRLENLIAEIPNQKRNMLFGNLVSLALGLTPNFKTNFELLEDAKLQISKDSYEEDLDNLLAQIGDQYADLFIAAKKLSDAILLSDIITVKGASTKAPLSASMVQRYEEHQQDLALLKNLVKKQIPEKYKEIFDNKEKNGYAGYIDGKTSQEEFYKYIKPILLKLDGTEKLISKLEREDFLRKQRTFDNGSIPHQIHLNELKAIIRRQEKFYPFLKENQKKIEKLFTFKIPYYVGPLANGQSSFAWLKRQSNESITPWNFEEVVDQEASARAFIERMTNFDTYLPEEKVLPKHSPLYEMFMVYNELTKVKYQTEGMKRPVFLSSEDKEEIVNLLFKKERKVTVKQLKEEYFSKMKCFHTVTILGVEDRFNASLGTYHDLLKIFKDKAFLDDEANQDILEEIVWTLTLFEDQAMIERRLVKYADVFEKSVLKKLKKRHYTGWGRLSQKLINGIKDKQTGKTILGFLKDDGVANRNFMQLINDSSLDFAKIIKNEQEKTIKNESLEETIANLAGSPAIKKGILQSIKIVDEIVKIMGQNPDNIVIEMARENQSTMQGIKNSRQRLRKLEEVHKNTGSKILKEYNVSNTQLQSDRLYLYLLQDGKDMYTGKELDYDNLSQYDIDHIIPQSFIKDNSIDNTVLTTQASNRGKSDNVPNIETVNKMKSFWYKQLKSGAISQRKFDHLTKAERGALSDFDKAGFIKRQLVETRQITKHVAQILDSRFNSNLTEDSKSNRNVKIITLKSKMVSDFRKDFGFYKLREVNDYHHAQDAYLNAVVGTALLKKYPKLEAEFVYGDYKHYDLAKLMIQPDSSLGKATTRMFFYSNLMNFFKKEIKLADDTIFTRPQIEVNTETGEIVWDKVKDMQTIRKVMSYPQVNIVMKTEVQTGGFSKESIWPKGDSDKLIARKKSWDPKKYGGFDSPIIAYSVLVVAKIAKGKTQKLKTIKELVGIKIMEQDEFEKDPIAFLEKKGYQDIQTSSIIKLPKYSLFELENGRKRLLASAKELQKGNELALPNKYVKFLYLASHYTKFTGKEEDREKKRSYVESHLYYFDEIMQIIVEYSNRYILADSNLIKIQNLYKEKDNFSIEEQAINMLNLFTFTDLGAPSAFKFFNGDIDRKRYSSTNEIINSTLIYQSPTGLYETRIDLSKLGGK

SEQ ID NO: 674 - protein, 1392 aa, Streptococcus mitis
MNNNNYSIGLDIGTNSVGWAVITDDYKVPSKKMKVLGNTDKHFIKKNLIGALLFDEGATAEDRRFKRTARRRYTRRKNRLRYLQEIFSEEMSKVDSSFFHRLDDSFLVPEDKRGSKYPIFATLAEEKEYHKKFPTIYHLRKHLADSKEKTDLRLIYLALAHMIKYRGHFLYEESFDIKNNDIQKIFSEFISIYDNTFEGSSLSGQNAQVEAIFTDKISKSAKRERILKLFAYEKSTDLFSEFLKLIVGNQADFKKHFDLEEKAPLQFSKDTYDEDLENLLGQIGDDFADLFLVAKKLYDAILLSGILTVTDSSTKAPLSASMIERYENHQKDLAALKQFIQNNLQEKYDEVFSDQSKDGYARYINGKTTQEAFYKYIKNLLSKFEGSDYFLDKIEREDFLRKQRTFDNGSIPHQIHLQEMNAIIRRQGEHYPFLKEYKEKIETILTFRIPYYVGPLARGNRNFAWLTRNSDQAIRPWNFEEIVDQASSAEEFINKMTNYDLYLPEEKVLPKHSLLYETFAVYNELTKVKFISEGLRDYQFLDSGQKKQIVNQLFKEKRKVTEKDIIQYLHNVDGYDGIELKGIEKQFNASLSTYHDLLKIIKDKEFMDDPKNEEILENIVHTLTIFEDREMIKQRLAQYASIFDKKVIKALTRRHYTGWGKLSAKLINGICDKKTGKTILDYLIDDGYSNRNFMQLINDDGLSFKDIIQKAQVVGKTNDVKQVVQELPGSPAIKKGILQSIKLVDELVKVMGHAPESIVIEIARENQTTARGKKNSQQRYKRIEDALKNLAPGLDSNILKEHPTDNIQLQNDRLFLYYLQNGKDMYTGEALDINQLSSYDIDHIVPQAFIKDDSLDNRVLTSSKDNRGKSDNVPSLEVVQKRKAFWQQLLDSKLISEHKFNNLTKAERGGLDERDKVGFIRRQLVETRQITKHVAQILDARFNTEVNEKDKKNRTVKIITLKSNLVSNFRKEFKLYKVREINDYHHAHDAYLNAVVAKAILKKYPKLEPGFVYGDYQKYDIKRYISRSKDPKEVEKATEKYFFYSNLLNFFKEEVHYADGTIVKRENIEYSKDTGEIAWNKEKDFATIKKVLSLPQVNIVKKTEIQTHGLDRGKPRGLFNSNPSPKPSEDRKENLVPIKQGLDPRKYGGYAGISNSYAVLVKAIIEKGAKKQQKTVLEFQGISILDKINFEKNKENYLLEKGYIKILSTITLPKYSLFEFPDGTRRRLASILSTNNKRGEIHKGNELVIPEKYTTLLYHAKNINKTLEPEHLEYVEKHRNDFAKLLEYVLNFNDKYVGALKNGERIRQAFIDWETVDIEKLCFSFIGPRNSKNAGLFELTSQGSASDFEFLGVKIPRYRDYTPSSLLNATLIHQSITGLYETRIDLSKLGED

SEQ ID NO: 675 - protein, 1134 aa, Streptococcus mutans
MANGKILGLDIGIASVGVGIIDKETGKIIHVNSRIFPAATADSNVERRGFRQGRRLVRRKKHRKVRLADLFLDSNLLTDFSKVSLNLNPYQLRVKGLNEELSNEELFIALKSIVSRRGISYLDDASEDSGANSSEYGKAVEENRKLLEDRTPGQIQLERFEKYGKVRGDFTVVENGENHRLINVFSTSAYKKEAERILRRQQEFNMRIADEFIEAYLTILTGKRKYYHGPGNEKSRTDYGRFRTDGTTLDNIFGILIGKCTFYPDEYRAAKASYTAQEFNLLNDLNNLTVPTETKKLSEEQKRQIIEHAKTVKTLGAPTLLKYIVKLVGCSADDIKGYRIDKSDKPEIHTFEAYRKMRTMELIKVDDLSRESLDALAHILTLNTEREGIEEAIRDRFTNKEFNQEQINELVLFRKNNSSLFGKGWHNFSLKLMKELIPELYETSEEQMTILTRLGKQRVKKSSNRTNYIDEKELTEEIYNPVVAKSVRQAIKIINLATKKYGVFDNIVIEMARESNEDDEKKAIQNAQKANEDEKKAALLKAAHQFNGKEELPDSIFHGHKELLTKIRLWHQQGEKCLYTGKTIFINDLIHNPYKYEIDHILPLSLSFDDSLANKVLVLSTANQEKGQRTPFQSLDSMDGAWTYREFKSYVKGLKTLSNKKKDYLLTEENIDKIEVKQKFIERNLVDTRYSSRVVLNALQDFYKERKFDTKISVVRGQFTSQLRRKWRIEKTRETYHHHAVDALIIAASSQLNLWKKQNNPLISYKEDQFVDPETGEILSLSDDEYKKLVFKAPYEHFVDTLKSKKFEDSILFSYQVDSKYNRKISGATICGTRKAQLGKDTQEETYVLGKIKDIYSQKGYEDFIKKYKKDKTQFLMYHKDPQTFEKVIEEILKTYPDKELNEKGKEVSCNPFEKYRQENGPVRKYSKKGNGPEIKSLKYYDEVLGKNIDITPKNSLNKVVLRSLNPWRTDVYFNHETRKYEFLGLKYSDLRYLKGEHRYGILIGDYKKIKDKEGIEKESEFKFTLYKNDLILIKDTAKGKEELFRFWSRTGKDNAKTFEKNKIELKPYSKSQFEKGEDTNVLGKLYASSNQLQKSFGTLENLSIYKVRTDVLGNKYFIKKEGDKPQLNFKKKL

SEQ ID NO: 676 - protein, 1134 aa, Streptococcus mutans; identical to SEQ ID NO: 675

SEQ ID NO: 677 - protein, 1128 aa, Streptococcus mutans
MANSKILGLDIGIASVGVGIIDKETGKIIHVNSRIFPAATADSNVERRGFRQGRRLVRRKKHRKVRLADLFLDSNLLTDFSKVSLNLNPYQLRVKGLNEELSNEELFIALKSIVSRRGISYLDDASEDSGANSSEYGKAVEENRKLLEDRTPGQIQLERFEKYGKVRGDFTVVENGENHRLINVFSTSAYKKEAERILRRQQEFNIRIADEFIEAYLTILTGKRKYYHGPGNEKSRTDYGRFRTDGTTLDNIFGILIGKCTFYPDEYRAAKASYTAQEFNLLNDLNNLTVPTETKKLSEEQKRQIIEHAKTVKTLGAPTLLKYIAKLVGCSADDIKGYRIDKSDKPEIHTFEAYRKMRTMELIKVADLSRESLDALAHILTLNTEREGIEEAIRDRFTNKEFNQEQINELVLFRKNNSSLFGKGWHNFSLKLMKELIPELYETSEEQMTILTRLGKQRVKKSSNRTNYIDEKELTEEIYNPVVAKSVRQAIKIINLATKKYGVFDNIVIEMARESNEDDEKKAIQNAQKANEDEKEAALLKAAHQFNGKEELPDSIFHGHKELLTKIRLWHQQGEKCLYTGKTIFINDLIHNPYKYEIDHILPLSLSFDDSLANKVLVLSTANQEKGQRTPFQSLDSMDGAWTYREFKAYVKGLKTLSNKKKDYLLNEEDINKNEVKQKFIERNLVDTRYSSRVVLNTLQDFYKKREFDTKISVVRGQFTSQIRRKWRIEKTRETYHHHAVDALIIAASSQLNLWKKQNNPLISYKEDQFVDPETGEILSLSDDEYKELVFKAPYDHFVDTLKSKKFEDSILFSYQVDSKYNRKISDATIYGTRKARLGKDSQEETYVLGKIKDIYSQKGYEDFIKKYKKDKTQFLMYHKDPQTFEKVIEEILKTYSDKELNEKGKEVPCNPFEKYRQENGPVRKYSKKGNGPEIKSIKYYDNKLGNHIDITPNNSHHQVVLQSLKPWRTDVYFNPKSGKYELMGLKYSDLRFEKVSGDYGISVKKYNEIKSKEGVDENSEFKFTLYKNDLILIKDTESGEQELFRFLSRTMPNQKHYVELKPYDKSKFEGHQKLMDIFGEVAKGGQCLKGLNKSNISIYKVKTDVLGNKYFIKKEGDQPQLNFKKKI

SEQ ID NO: 678 - protein, 1128 aa, Streptococcus mutans; identical to SEQ ID NO: 677

SEQ ID NO: 679 - protein, 1338 aa, Streptococcus mutans
MDLIGTNSVGWAVVTDDYKVPAKKMKVLGNTDKSHIKKNLLGALLFDSGNTAADRRLKRTARRRYTRRRNRILYLQEIFAEEMSKVDDSFFHRLEDSFLVTEDKRGERHPIFGNLEEEVKYHENFPTIYHLRQYLADNPEKVDLRLVYLALAHIIKFRGHFLIEGKFDTRNNDVQRLFQEFLAVYDNTFENSSLQEQNVQVEEILTDKISKSAKKDRVLKLFPNEKSNGRFAEFLKLIVGNQADFKKHFELEEKAPLQFSKDTYEEELEVLLAQIGDNYAELFLSAKKLYDSILLSGILTVTDVSTKAPLSASMIQRYNEHQMDLAQLKQFIRQKLSDKYNEVFSDVSKDGYAGYIDGKTNQEAFYKYLKGLLNKIEGSGYFLDKIEREDFLRKQRTFDNGSIPHQIHLQEMRAIIRRQAEFYPFLADNQDRIEKILTFRIPYYVGPLARGKSDFAWLSRKSADKITPWNFDEIVDKESSAEAFINRMTNYDLYLPNQKVLPKHSLLYEKFTVYNELTKVKYKTEQGKTAFFDANMKQEIFDGVFKVYRKVTKDKLMDFLEKEFDEFRIVDLTGLDKENKAFNASYGTYHDLRKILDKDFLDNSKNEKILEDIVLTLTLFEDREMIRKRLENYSDLLTKEQVKKLERRHYTGWGRLSAELIHGIRNKESRKTILDYLIDDGNSNRNFMQLINDDALSFKEEIAKAQVIGETDNLNQVVSDIAGSPAIKKGILQSLKIVDELVKIMGHQPENIVVEMARENQFTNQGRRNSQQRLKGLTDSIKEFGSQILKEHPVEHSQLQNDRLFLYYLQNGRDMYTGEELDIDYLSQYDIDHIIPQAFIKDNSIDNRVLTSSKENRGKSDDVPSKNVVRKMKSYWSKLLSAKLITQRKFDNLTKAERGGLTDDDKAGFIKRQLVETRQITKHVARILDERFHTETDENNKKIRQVKIVTLKSNLVSNFRKEFELYKVREINDYHHAHDAYLNAVIGKALLGVYPQLEPEFVYGDYPHFHGHKENKATAKKFFYSNIMNFFKKDDVRTDKNGEIIWKKDEHISNIKKVLSYPQVNIVKKVEEQTGGFSKESILPKGNSDKLIPRKTKKFYWDTKKYGGFDSPIVAYSILVIADIEKGKSKKLKTVKALVGVTIMEKMTFERDPVAFLERKGYRNVQEENIIKLPKYSLFKLENGRKRLLASARELQKGNEIVLPNHLGTLLYHAKNIHKVDEPKHLDYVDKHKDEFKELLDVVSNFSKKYTLAEGNLEKIKELYAQNNGEDLKELASSFINLLTFTAIGAPATFKFFDKNIDRKRYTSTTEILNATLIHQSITGLYETRIDLSKLGGD

SEQ ID NO: 680 - protein, 1338 aa, Streptococcus mutans; identical to SEQ ID NO: 679

SEQ ID NO: 681 - protein, 1345 aa, Streptococcus mutans
MKKPYSIGLDIGTNSVGWAVVTDDYKVPAKKMKVLGNTDKSHIEKNLLGALLFDSGNTAEDRRLKRTARRRYTRRRNRILYLQEIFSEEMGKVDDSFFHRLEDFFLVTEDKRGERHPIFGNLEEEVKYHENFPTIYHLRQYLADNPEKVDLRLVYLALAHIIKFRGHFLIEGKFDTRNNDVQRLFQEFLAVYDNTFENSSLQEQNVQVEEILTDKISKSAKKDRVLKLFPNEKSNGRFAEFLKLIVGNQADFKKHFELEEKAPLQFSKDTYEEELEVLLAQIGDNYAELFLSAKKLYDSILLSGILTADDSSTKAPLSASMIQRYNEHQMDLAQLKQFIRQKLSDKYNEVFSDVSKDGYAGYIDGKTNQEAFYKYLKGLLNKIEGSGYFLDKIEREDFLRKQRTFDNGSIPHQIHLQEMRAIIRRQSEFYPFLADNQDRIEKILTFRIPYYVGPLARGKSDFAWLSRKSADKITPWNFDEIVDKESSAEAFINRMTNYDLYLPNQKVLPKHSLLYEKFTVYNELTKVKYKTEQGETAFFDANMKQEIFDGVFKVYRKVTKDKLMDFLEKEFDEFRIVDLTGLDKENKAFNASYGTYHDLRKILDKDFLDNSKNEKILEDIVLTLTLFEDREMIRKRLKNYSDLLTKEQLKKLERRHYTGWGRLSAELIHGIRNKESRKTILDYLIDDGNSNRNFMQLINDDALSFKEEIAKAQVIGETDNLNQVVSDIAGSPAIKKGILQSLKIVDELVKIMGHQPENIVVEMARENQFTNQGRRNSQQRLKGLTDSIKEFGSQILKEHPVENSQLQNDRLFLYYLQNGRDMYTGEELDIDYLSQYDIDHIIPQAFIKDNSIDNRVLTSSKENRGKSDDVPSKDVVRKMKPYWSKLLSAKLITQRKFDNLTKAERGGLTDDDKAGFIKRQLVETRQITKHVARILDERFNTETDENNKKIRQVKIVTLKSNLVSNFRKEFELYKVREINDYHHAHDAYLNAVIGKALLGVYPQLEPEFVYGDYPHFHGHEENKATAKKFFYSNIMNFFKKDDVRTDKNGEIIWKKDEHISNIKKVLSYPQVNIVKKVEEQTGGFSKESILPKGNSDKLIPRKTKKFYWDTKKYGGFDSPIVAYSILVIADIEKGKSKKLKTVKALVGVTIMEKMTFERDPVAFLERKGYRNVQEENIIKLPKYSLFKLENGRKRLLASARELQKGNEIVLPNHLGTLLYHAKNIHKVDEPKHLDYVDKHKDEFKELLDVVSNFSKKYTLAEGNLEKIKELYAQNNGEDLKELASSFINLLTFTAIGAPATFKFFDKNIDRKRYTSTTEILNATLIHQSITGLYETRIDLSKLGGD

SEQ ID NO: 682 - protein, 1345 aa, Streptococcus mutans; identical to SEQ ID NO: 681

SEQ ID NO: 683 - protein, 1229 aa, Streptococcus mutans
MKKPYSIGLDIGTNSVGWAVVTDDYKVPAKKMKVLGNTDKSHIEKNLLGALLFDSGNTAEDRRLKRTARRRYTRRRNRILYLQEIFSEEMGKVDDSFFHRLEDSFLVTEDKRGERHPIFGNLEEEVKYHENFPTIYHLRQYLADNPEKVDLRLVYLALAHIIKFRGHFLIEGKFDTRNNDVQRLFQEFLAVYDNTFENSSLQEQNIQVEEILTDKISKSAKKDRVLKLFPNEKSNGRFAEFLKLIVGNQADFKKHFELEEKAPLQFSKDTYEEELEVLLAQIGDNYAELFLSAKKLYDSILLSGILTVTDVGTKAPLSASMIQRYNEHQMDLTQLKQFIRQKLSDKYNEVFSDVSKDGYAGYIDGKTNQEAFYKYLKGLLNKIEGSGYFLDKIEREDFLRKQRTFDNGSIPHQIHLQEMRAIIRRQAEFYPFLADNQDRIEKILTFRIPYYVGPLARGKSDFAWLSRKSADKITPWNFDEIVDKESSAEAFINRMTNYDLYLPNQKVLPKHSLLYEKFTVYNELTKVKYKTEQGKTAFFDANMKQEIFDGVFKVYRKVTKDKLMDFLEKEFDEFRIVDLTGLDKENKVFNASYGTYHDLCKILDKDFLDNSKNEKILEDIVLTLTLFEDREMIRKRLENYSDLLTKEQVKKLERRHYTGWGRLSAELIHGIRNKESRKTILDYLIDDGNSNRNFMQLINDDALSFKEEIAKAQVIGETDNLNQVVSDIAGSPAIKKGILQSLKIVDELVKIMGHQPENIVVEMARENQFTNQGRRNSQQRLKGLTDSIKEFGSQILKEHPVENSQLQNDRLFLYYLQNGRDMYTGEELDIDYLSQYDIDHIIPQAFIKDNSIDNRVLTSSKENRGKSDDVPSKDVVRKMKPYWSKLLSAKLITQRKFDNLTKAERGGLTDDDKAGFIKRQLVETRQITKHVARILDERFNTETDENNKKIRQVKIVTLKSNLVSNFRKEFELYKVREINDYHHAHDAYLNAVIGKALLGVYPQLEPEFVYGDYPHFHGHEENKATAKKFFYSNIMNFFKKDDVRTDKNGEIIWKKDEHISNIKKVLSYPQVNIVKKVEEQTIGQNGGLFDDNPKSPLEVIPSKLVPLKKALNPEKYGGYQKPTTAYPILLIVDTKQLIPISVMDKKRFEQNPVKFLKDKGYQQIEKNNFVKLPKYTLVDIGNGIKRLWASSKEVHKGNQLVVSKKSQDLLYHAHHLDNDYSNEYVKNHY

SEQ ID NO: 684 - protein, 1229 aa, Streptococcus mutans; identical to SEQ ID NO: 683

SEQ ID NO: 685 - protein, 1345 aa, Streptococcus mutans
MKKPYSIGLDIGTNSVGWAVVTDDYKVPAKKMKVLGNTDKSHIEKNLLGALLFDSGNTAEDRRLKRTARRRYTRRRNRILYLQEIFSEEMGKVDDSFFHRLEDSFLVTEDKRGERHPIFGNLEEEVKYHENFPTIYHLRQYLADNPEKVDLRLVYLALAHIIKFRGHFLIEGKFDTRNNDVQRLFQEFLAVYDNTFENSSLQEQNVQVEEILTDKISKSAKKDRVLKLFPNEKSNGRFAEFLKLIVGNQADFKKHFELEEKAPLQFSKDTYEEELEVLLAQIGDNYAELFLSAKKLYDSILLSGILTVTDVGTKAPLSASMIQRYNEHQMDLAQLKQFIRQKLSDKYNEVFSDVSKDGYAGYIDGKTNQEAFYKYLKGLLNKIEGSGYFLDKIEREDFLRKQRTFDNGSIPHQIHLQEMRAIIRRQAEFYPFLADNQDRIEKLLTFRIPYYVGPLARGKSDFAWLSRKSADKITPWNFDEIVDKESSAEAFINRMTNYDLYLPNQKVLPKHSLLYEKFTVYNELIKVKYKTEQGKTAFFDANMKQEIFDGVFKVYRKVTKDKLMDFLEKEFDEFRIVDLTGLDKENKVFNASYGTYHDLCKILDKDFLDNSKNEKILEDIVLTLTLFEDREMIRKRLENYSDLLTKEQVKKLERRHYTGWGRLSAELIHGIRNKESRKTILDYLIDDGNSNRNFMQLINDDALSFKEEIAKAQVIGETDNLNQVVSDIAGSPAIKKGILQSLKIVDELVKIMGHQPENIVVEMARENQFTNQGRRNSQQRLKGLTDSIKEFGSQILKEHPVENSQLQNDRLFLYYLQNGRDMYTGEELDIDYLSQYDIDHIIPQAFIKDNSIDNRVLTSSKENRGKSDDVPSKDVVRKMKSYWSKLLSAKLITQRKFDNLTKAERGGLTDDDKAGFIKRQLVETRQITKHVARILDERFNTETDENNKKIRQVKIVTLKSNLVSNFRKEFELYKVREINDYHHAHDAYLNAVIGKALLGVYPQLEPEFVYGDYPHFHGHKENKATAKKFFYSNIMNFFKKDDVRTDKNGEIIWKKDEHISNIKKVLSYPQVNIVKKVEEQTGGFSKESILPKGNSDKLIPRKTKKFYWDTKKYGGFDSPIVAYSILVIADIEKGKSKKLKTVKALVGVTIMEKMTFERDPVAFLERKGYRNVQEENIIKLPKYSLFKLENGRKRLLASARELQKGNEIVLPNHLGTLLYHAKNIHKVDEPKHLDYVDKHKDEFKELLDVVSNFSKKYTLAEGNLEKIKELYAQNNGEDLKELASSFINLLTFTAIGAPATFKFFDKNIDRKRYTSTTEILNATLIHQSITGLYETRIDLNKLGGD

SEQ ID NO: 686 - protein, 1350 aa, Streptococcus mutans
MKKPYSIGLDIGTNSVGWAVVTDDYKVPAKKMKVLGNTDKSHIEKNLLGALLFDSGNTAEDRRLKRTARRRYTRRRNRILYLQEIFSEEMGKVDDSFFHRLEDSFLVTEDKRGERHPIFGNLEEEVKYHENFPTIYHLRQYLADNPEKVDLRLVYLALAHIIKFRGHFLIEGKFDTRNNDVQRLFQEFLAVYDNTFENSSLQEQNVQVEEILTDKISKSAKKDRVLKLFPNEKSNGRFAEFLKLIVGNQADFKKHFELEEKAPLQFSKDTYEEELEVLLAQIGDNYAELFLSAKKLYDSILLSGILTVTDVSTKAPLSASMIQRYNEHQMDLTQLKQFIRQKLSDKYNEVFSDVSKDGYAGYIDGKTNQEAFYKYLKGLLNKIEGSGYFLDKIEREDFLRKQRTFDNGSIPHQIHLQEMRAIIRRQAEFYSFLADNQDRIEKILTFRIPYYVGPLARGKSDFAWLSRKSADKITPWNFDEIVDKESSAEAFINRMTNYDLYLPNQKVLPKHSLLYEKFTVYNELTKVKYKTEQGKTAFFDANMKQEIFDGVFKVYRKVTKDKLMDFLEKEFDEFRIVDLTGLDKENKAFNASYGTYHDLRKILDKDFLDNSKNEKILEDIVLTLTLFEDREMIRKRLENYSDLLTKEQVKKLERRHYTGWGRLSAELIHGIRNKESRKTILDYLIDDGNSNRNFMQLINDDALSFKEEIAKAQVIGETDNLNQVVSDIAGSPAIKKGILQSLKIVDELVKIMGHQPENIVVEMARENQFTNQGRRNSQQRLKGLTDSIKEFGSQILKEHPVENSQLQNDRLFLYYLQNGRDMYTGEELDIDYLSQYDIDHIIPQAFIKDNSIDNRVLTSSKENRGKSDDVPSEDVVNRMRPFWNKLLSSGLISQRKYNNLTKKELTLDDKAGFIKRQLVETRQITKHVARMLDERFNKEFDDNNKRIRKVKIVTLKSNLVSSFRKEFELYKVREINDYHHAHDAYLNAVVVKALLVKYSKLEPEFVYGEYPKYNSYRERKTATQKMFFYSNIMNMFKSKVKLADDQIVERPMIEVNDETGEIAWDKTKHITTVKKVLSYPQVNIVKKVEEQTIGQNGGLFDDNPKSPLEVIPSKLVPLKKALNPEKYGGYQKPTTAYPILLIVDTKQLIPISVMDKKRFEQNPVKFLKDKGYQQIEKNNFVKLPKYTLVDIGNGIKRLWASSKEVHKGNQLVVSKKSQDLLYHAHHLDNDYSNEYVKNHYQQFDILFNEITSFSKKCKLGKEHIQKIEEAYSKERDSASIEELADGFIKLLGFTQLGATSPFSFLGIKLNQKQYTGKKDYLLPCMEATLIHQSITGLYETRIDLSKLGGD

SEQ ID NO: 687 - protein, 1350 aa, Streptococcus mutans
MKKPYSIGLDIGTNSVGWAVVTDDYKVPAKKMKVLGNTDKSHIEKNLLGALLFDSGNTAEDRRLKRTARRRYTRRRNRILYLQEIFSEEMGKVDDSFFHRLEDSFLVTEDKRGERHPIFGNLEEEVKYHENFPTIYHLRQYLADNPEKVDLRLVYLALAHIIKFRGHFLIEGKFDTRNNDVQRLFQEFLAVYDNTFENSSLQEQNVQVEEILTDKISKSAKKDRVLKLFPNEKSNGRFAEFLKLIVGNQADFKKHFELEEKAPLQFSKDTYEEELEVLLAQIGDNYAELFLSAKKLYDSILLSGILTVTDVSTKAPLSASMIQRYNEHQMDLTQLKQFIRQKLSDKYNEVFSDVSKDGYAGYIDGKTNQEAFYKYLKGLLNKIEGSGYFLDKIEREDFLRKQRTFDNGSIPHQIHLQEMRAIIRRQAEFYPFLADNQDRIEKILTFRIPYYVGPLARGKSDFAWLSRKSADKITPWNFDEIVDKESSAEAFINRMTNYDLYLPNQKVLPKHSLLYEKFTVYNELTKVKYKTEQGKTAFFDANMKQEIFDGVFKVYRKVTKDKLMDFLEKEFDEFRIVDLTGLDKENKAFNASYGTYHDLRKILDKDFLDNSKNEKILEDIVLTLTLFEDREMIRKRLKNYSDLLTKEQLKKLERRHYTGWGRLSAELIHGIRNKESRKTILDYLIDDGNSNRNFMQLINDDALSFKEEIAKAQVIGETDNLNQVVSDIAGSPAIKKGILQSLKIVDELVKIMGHQPENIVVEMARENQFTNQGRQNSQQRLKGLTDSIKEFGSQILKEHPVENSQLQNDRLFLYYLQNGRDMYTGEELDIDYLSQYDIDHIIPQAFIKDNSIDNRVLTSSKENRGKSDDVPSEDVVNRMRPFWNKLLSSGLISQRKYNNLTKKELTLDDKAGFIKRQLVETRQITKHVARMLDERFNKEFDDNNKRICKVKIVTLKSNLVSSFRKEFELYKVREINDYHHAHDAYLNAVVVKALLVKYSKLEPEFVYGEYPKYNSYRERKTATQKMFFYSNIMNMFKSKVKLADDQIVERPMIEVNDETGEIAWDKTKHITTVKKVLSYPQVNIVKKVEEQTIGQNGGLFDDNPKSPLEVIPSKLVPLKKALNPEKYGGYQKPTTAYPILLIVDTKQLIPISVMDKKRFEQNPVKFLKDKGYQQIEKNNFVKLPKYTLVDIGNGIKRLWASSKEVHKGNQLVVSKKSQDLLYHAHHLDNDYSNEYVKNHYQQFDILFNEITSFSKKCKLGKEHIQKIEEAYSKERDSASIEELADGFIKLLGFTQLGATSPFSFLGIKLNQKQYTGKKDYLLPCMEATLIHQSITGLYETRIDLSKLGGD

SEQ ID NO: 688 - protein, 1345 aa, Streptococcus mutans; identical to SEQ ID NO: 685

SEQ ID NO: 689 - protein, 1350 aa, Streptococcus mutans; identical to SEQ ID NO: 686

SEQ ID NO: 690 - protein, 1350 aa, Streptococcus mutans; identical to SEQ ID NO: 687

SEQ ID NO: 691 - protein, 1345 aa, Streptococcus mutans
MKKPYSIGLDIGTNSVGWAVVTDDYKVPAKKMKVLGNTDKSHIKKNLLGALLFDSGNTAADRRLKRTARRRYTRRRNRILYLQEIFAEEMSKVDDSFFHRLEDSFLVTEDKRGERHPIFGNLEEEVKYHENFPTIYHLRQYLADNPEKVDLRLVYLALAHIIKFRGHFLIEGKFDTRNNDVQRLFQEFLAVYDNTFENSSLQEQNVQVEEILTDKISKSAKKDRVLKLFPNEKSNGRFAEFLKLIVGNQADFKKHFELEEKAPLQFSKDTYEEELEVLLTQIGDNYAELFLSAKKLYDSILLSGILTVTDVSTKAPLSASMIQRYNEHQMDLAQLKQFIRQKLSDKYNEVFSDVSKDGYAGYIDGKTNQEAFYKYLKGLLNKIEGSGYFLDKIEREDFLRKQRTFDNGSIPHQIHLQEMRAIIRRQAEFYPFLADNQDRIEKILTFRIPYYVGPLARGKSDFAWLSRKSADKITPWNFDEIVDKESSAEAFINRMTNYDLYLPNQKVLPKHSLLYEKFTVYNELTKVKYKTEQGKTAFFDANMKQEIFDGVFKVYRKVTKDKLMDFLEKEFDEFRIVDLTGLDKENKAFNASYGTYHDLRKILDKDFLDNSKNEKILEDIVLTLTLFEDREMIRKRLENYSDLLTKEQVKKLERRHYTGWGRLSAELIHGIRNKESRKTLLDYLIDDGNSNRNFMQLINDDALSFKEEIAKAQVIGETDNLNQVVSDIAGSPAIKKGILQSLKIVDELVKIMGHQPENIVVEMARENQFTNQGRRNSQQRLKGLTDSIKEFGSQILKEHPVENSQLQNDRLFLYYLQNGRDMYTGEELDIDYLSQYDIDHIIPQAFIKDNSIDNRVLTSSKENRGKSDDVPSKDVVRKMKPYWSKLLSAKLITQRKFDNLTKAERGGLTDDDKAGFIKRQLVETRQITKHVARILDERFNTETDENNKKIRQVKIVTLKSNLVSNFRKEFELYKVREINDYHHAHDAYLNAVIGKALLGVYPQLEPEFVYGDYPHFHGHEENKATAKKFFYSNIMNFFKKDDVRTDKNGEIIWKKDEHISNIKKVLSYPQVNIVKKVEEQTGGFSKESILPKGNSDKLIPRKTKKFYWDTKKYGGFDSPIVAYSILVIADIEKGKSKKLKTVKALVGVTIMEKMTFERDPVAFLERKGYRNVQEENIIKLPKYSLFKLENGRKRLLASARELQKGNEIVLPNHLGTLLYHAKNIHKVDEPKHLDYVDKHKDEFKELLDVVSNFSKKYTLAEGNLEKIKELYAQNNGEDLKELSSSFINLLTFTAIGAPAAFKFFDKNIDRKRYTSTTEILNATLIHQSITGLYETRIDLSKLGGD

SEQ ID NO: 692 - protein, 1345 aa, Streptococcus mutans
MKKPYSIGLDIGTNSVGWAVVTDDYKVPAKKMKVLGNTDKSHIKKNLLGALLFDSGNTAADRRLKRTARRRYTRRRNRILYLQEIFAEEMSKVDDSFFHRLEDSFLVTEDKRGERHPIFGNLEEEVKYHENFPTIYHLRQYLADNPEKVDLRLVYLALAHIIKFRGHFLIEGKFDTRNNDVQRLFQEFLAVYDNTFENSSLQEQNVQVEEILTDKISKSAKKDRVLKLFPNEKSNGRFAEFLKLIVGNQADFKKHFELEEKAPLQFSKDTYEEELEVLLAQIGDNYAELFLSAKKLYDSILLSGILTVTDVSTKAPLSASMIQRYNEHQMDLAQLKQFIRQKLSDKYNEVFSDVSKDGYAGYIDGKTNQEAFYKYLKGLLNKIEGSGYFLDKIEREDFLRKQRTFDNGSIPHQIHLQEMRAIIRRQAEFYPFLADNQDRIEKILTFRIPYYVGPLARGKSDFAWLSRKSADKITPWNFDEIVDKESSAEAFINRMTNYDLYLPNQKVLPKHSLLYEKFTVYNELTKVKYKTEQGKTAFFDANMKQEIFDGVFKVYRKVTKDKLMDFLEKEFDEFRIVDLTGLDKENKAFNASYGTYHDLRKILDKDFLDNSKNEKILEDIVLTLTLFEDREMIRKRLENYSDLLTKEQVKKLERRHYTGWGRLSAELIHGIRNKESRKTILDYLIDDGNSNRNFMQLINDDALSFKEEIAKAQVIGETDNLNQVVSDIAGSPAIKKGILQSLKIVDELVKIMGHQPENIVVEMARENQFTNQGRRNSQQRLKGLTDSIKEFGSQILKEHPVEHSQLQNDRLFLYYLQNGRDMYTGEELDIDYLSQYDIDHIIPQAFIKDNSIDNRVLTSSKENRGKSDDVPSKNVVRKMKSYWSKLLSAKLITQRKFDNLTKAERGGLTDDDKAGFIKRQLVETRQITKHVARILDERFHTETDENNKKIRQVKIVTLKSNLVSNFRKEFELYKVREINDYHHAHDAYLNAVIGKALLGVYPQLEPEFVYGDYPHFHGHKENKATAKKFFYSNIMNFFKKDDVRTDKNGEIIWKKDEHISNIKKVLSYPQVNIVKKVEEQTGGFSKESILPKGNSDKLIPRKTKKFYWDTKKYGGFDSPIVAYSILVIADIEKGKSKKLKTVKALVGVTIMEKMTFERDPVAFLERKGYRNVQEENIIKLPKYSLFKLENGRKRLLASARELQKGNEIVLPNHLGTLLYHAKNIHKVDEPKHLDYVDKHKDEFKELLDVVSNFSKKYTLAEGNLEKIKELYAQNNGEDLKELASSFINLLTFTAIGAPATFKFFDKNIDRKRYTSTTEILNATLIHQSITGLYETRIDLSKLGGD

SEQ ID NO: 693 - protein, 1345 aa, Streptococcus mutans
MKKPYSIGLDIGTNSVGWAVVTDDYKVPAKKMKVLGNTDKSHIKKNLLGALLFDSGNTAADRRLKRTARRRYTRRRNRILYLQEIFAEEMSKVDDSFFHRLEDSFLVTEDKRGERHPIFGNLEEEVKYHENFPTIYHLRQYLADNPEKVDLRLVYLALAHIIKFRGHFLIEGKFDTRNNDVQRLFQEFLAVYDNTFENSSLQEQNVQVEEILTDKISKSAKKDRVLKLFPNEKSNGRFAEFLKLIVGNQADFKKHFELEEKAPLQFSKDTYEEELEVLLAQIGDNYAELFLSAKKLYDSILLSGILTVTDVSTKAPLSASMIQRYNEHQMDLAQLKQFIRQKLSDKYNEVFSDVSKDGYAGYIDGKTNQEAFYKYLKGLLNKIEGSGYFLDKIEREDFLRKQRTFDNGSIPHQIHLQEMRAIIRRQAEFYPFLADNQDRIEKILTFRIPYYVGPLARGKSDFAWLSRKSADKITPWNFDEIVDKESSAEAFINRMTNYDLYLPNQKVLPKHSLLYEKFTVYNELTKVKYKTEQGKTAFFDANMKQEIFDGVFKVYRKVTKDKLMDFLEKEFDEFRIVDLTGLDKENKVFNASYGTYHDLCKILDKDFLDNSKNEKILEDIVLTLTLFEDREMIRKRLENYSDLLTKEQVKKLERRHYTGWGRLSAELIHGIRNKESRKTILDYLIDDGNSNRNFMQLINDDALSFKEEIAKAQVIGETDNLNQVVSDIAGSPAIKKGILQSLKIVDELVKIMGHQPENIVVEMARENQFTKQGRRNSQQRLKGLTDSIKEFGSQILKEHPVENSQLQNDRLFLYYLQNGRDMYTGEELDIDYLSQYDIDHIIPQAFIKDNSIDNRVLTSSKENRGKSDDVPSKDVVRKMKSYWSKLLSAKLITQRKFDNLTKAERGGLTDDDKAGFIKRQLVETRQITKHVARILDERFYTETDENNKKIRQVKIVTLKSNLVSNFRKEFELYKVREINDYHHAHDAYLNAVIGKALLGVYPQLEPEFVYGDYPHFHGHKENKATAKKFFYSNIMNFFKKDDVRTDKNGEIIWKKDEHISNIKKVLSYPQVNIVKKVEEQTGGFSKESILPKGNSDKLIPRKTKKFYWDTKKYGGFDSPIVAYSILVIADIEKGKSKKLKTVKALVGVTIMEKMTFERDPVAFLERKGYRNVQEENIIKLPKYSLFKLENGRKRLLASARELQKGNEIVLPNHLGTLLYHAKNIHKVDEPKHLDYVDKHKDEFKELLDVVSNFSKKYTLAEGNLEKIKELYAQNNGEDLKELASSFINLLTFTAIGAPATFKFFDKNIDRKRYTSTTEILNATLIHQSITGLYETRIDLSKLGGD

SEQ ID NO: 694 - protein, 1345 aa, Streptococcus mutans
MKKPYSIGLDIGTNSVGWAVVTDDYKVPAKKMKVLGNTDKSHIKKNLLGALLFDSGNTAADRRLKRTARRRYTRRRNRILYLQEIFAEEMSKVDDSFFHRLEDSFLVTEDKRGERHPIFGNLEEEVKYHENFPTIYHLRQYLADNPEKVDLRLVYLALAHIIKFRGHFLIEGKFDTRNNDVQRLFQEFLAVYDNTFENSSLQEQNVQVEEILTDKISKSAKKDRVLKLFPNEKSNGRFAEFLKLIVGNQADFKKHFELEEKAPLQFSKDTYEEELEVLLAQIGDNYAELFLSAKKLYDSILLSGILTVTDVSTKAPLSASMIQRYNEHQMDLAQLKQFIRQKLSDKYNEVFSDVSKDGYAGYIDGKTNQEAFYKYLKGLLNKIEGSGYFLDKIEREDFLRKQRTFDNGSIPHQIHLQEMRAIIRRQAEFYPFLADNQDRIEKILTFRIPYYVGPLARGKSDFAWLSRKSADKITPWNFDEIVDKESSAEAFINRMTNYDLYLPNQKVLPKHSLLYEKFTVYNELTKVKYKTEQGKTAFFDANMKQEIFDGVFKVYRKVTKDKLMDFLEKEFDEFRIVDLTGLDKENKAFNASYGTYHDLRKILDKDFLDNSKNEKILEDIVLTLTLFEDREMIRKRLENYSDLLTKEQVKKLERRHYTGWGRLSAELIHGIRNKESRKTILDYLIDDGNSNRNFMQLINDDALSFKEEIAKAQVIGETDNLNQVVSDIAGSPAIKKGILQSLKIVDELVKIMGHQPENIVVEMARENQFTNQGRRNSQQRLKGLTDSIKEFGSQILKEHPVENSQLQNDRLFLYYLQNGRDMYTGEELDIDYLSQYDIDHIIPQAFIKDNSIDNRVLTSSKENRGKSDDVPSKNVVRKMKSYWSKLLSAKLITQRKFDNLTKAERGGLTDDDKAGFIKRQLVETRQITKHVARILDERFHTETDENNKKIRQVKIVTLKSNLVSNFRKEFELYKVREINDYHHAHDAYLNAVIGKALLGVYPQLEPEFVYGDYPHFHGHKENKATAKKFFYSNIMNFFKKDDVRTDKNGEIIWKKDEHISNIKKVLSYPQVNIVKKVEEQTGGFSKESILPKGNSDKLIPRKTKKFYWDTKKYGGFDSPIVAYSILVIADIEKGKSKKLKTVKALVGVTIMEKMTFERDPVAFLERKGYRNVQEENIIKLPKYSLFKLENGRKRLLASARELQKGNEIVLPNHLGTLLYHAKNIHKVDEPKHLDYVDKHKDEFKELLDVVSNFSKKYTLAEGNLEKIKELYAQNNGEDLKELSSSFINLLTFTAIGAPAAFKFFDKNIDRKRYTSTTEILNATLIHQSITGLYETRIDLSKLGGD

SEQ ID NO: 695 - protein, 1345 aa, Streptococcus mutans; identical to SEQ ID NO: 691

SEQ ID NO: 696 - protein, 1345 aa, Streptococcus mutans; identical to SEQ ID NO: 692

SEQ ID NO: 697 - protein, 1345 aa, Streptococcus mutans; identical to SEQ ID NO: 693

SEQ ID NO: 698 - protein, 1345 aa, Streptococcus mutans; identical to SEQ ID NO: 694

SEQ ID NO: 699 - protein, 1345 aa, Streptococcus mutans; identical to SEQ ID NO: 692

SEQ ID NO: 700 - protein, 1345 aa, Streptococcus mutans; identical to SEQ ID NO: 692

SEQ ID NO: 701 - protein, 1345 aa, Streptococcus mutans; identical to SEQ ID NO: 692

SEQ ID NO: 702 - protein, 1345 aa, Streptococcus mutans; identical to SEQ ID NO: 692

SEQ ID NO: 703 - protein, 1359 aa, Streptococcus mutans
MKKPYSIGLDIGTNSVGWAVVTDDYKVPAKKMKVLGNTDKSHIKKNLLGALLFDSGNTAEDRRLKRTARRRYTRRRNRILYLQEIFAEEMMQVDESFFQRLDDSFLVEEDKRGSRYPIFGTLKEEKKYHKEFKTIYHLREKLANSTEKADLRLVYLSLAHMIKFRGHFLIEGQLKAENTNVQALFKDFVEVYDKTVEESHLSEMTVDALSILTEKVSKSRRLENLVECYPTEKKNTLFGNLIALSLGLQPNFKTNFQLSEDAKLQFSKDTYEEDLEGLLGEIGDEYADLFASAKNLYDAILLSGILAVDDNTTKAPLSASMVKRYKEHKEELAAFKRFIKEKLPKKYEEIFKDDTKNGYAGYVGADKKLRKRSGKLATEEEFYKYVKGILNKVEGADVWLDKIDREDFLRKQRTFDNGSIPHQIHLQEMHAILRRQGEHYPFLKENQDKIEKILTFRIPYYVGPLVRKGSRFAWAEYKADEKITPWNFDDILDKEKSAEKFITRMTLNDLYLPEEKVLPKHSLLYETFTVYNELTKVKYVNEQGEAKFFDANMKQEIFDHVFKENRKVTKDKLLNYLNKEFEEFRIVNLTGLDKENKVFNSSLGTYHDLRKILNKSFLDNKENEQIIEDIIQTLTLFEDREMIRQRLQKYSDIFTKAQLKKLERRHYTGWGRLSYKLINGIRDKQSNKTILGYLIDDGYSNRNFMQLINDDALSFKEEIAKAQVIGEMDGLNQVVSDIAGSPAIKKGILQSLKIVDELVKVMGHNPANIVIEMARENQTTAKGRRSSQKRYKRLEEAIKNLDHDLNHKILKEHPTDNQALQNDRLFLYYLQNGRDMYTEDPLDINRLSDYDIDHIIPQAFIKDNSIDNRVLTRSDKNRGKSDDVPSEEVVHKMKPFWSKLLSAKLITQRKFDNLTKAERGGLTDDDKAGFIKRQLVETRQITKHVARILDERFNTETDENNKKIRQVKIVTLKSNLVSNFRKEFELYKVREINDYHHAHDAYLNAVIGKALLGVYPQLEPEFVYGDYPHFHGHKENKATAKKFFYSNIMNFFKKGDVRTDKNGEIIWKKDEHISNIKKVLSYPQVNIVKKVEEQTGGFSKESILPKGNSDKLIPRKTKKFYWDTKKYGGFDSPIVAYSILVIADIEKGKSKKLKTVKALVGVTIMEKMTFERDPVAFLERKGYRNVQEENIIKLPKYSLFKLENGRKRLLASARELQKGNEIVLPNHLETLLYHAKNIHKVDEPKHLDYVDKHKDEFKELLDVVSNFSKKYTLAEGNLEKIKELYAQNNGEDLKELASSFINLLTFTAIGAPAAFKFFDKNIDRKRYTSTTEILNATLIHQSITGLYETRIDLNKLGGD

SEQ ID NO: 704 - protein, 1359 aa, Streptococcus mutans; identical to SEQ ID NO: 703

SEQ ID NO: 705 - protein, 1355 aa, Streptococcus mutans
MKKPYSIGLDIGTNSVGWAVVTDDYKVPAKKMKVLGNTDKSHIKKNLLGALLFDSGNTAEDRRLKRTARRRYTRRRNRILYLQEIFAEEMSKVDDSFFHRLDESFLTDDDKNFDSHPIFGNKAEEDAYHQKFPTIYHLRKHLADSTEKADLRLVYLALAHMIKFRGHFLIEGELNAENTDVQKLFADFVGVYDRTFDDSHLSEITVDASSILTEKISKSRRLEKLINNYPKEKKNTLFGNLIALSLGLQPNFKTNFKLSEDAKLQFSKDTYEEDLEELLGKIGDDYADLFTLAKNLYDAILLSGILTADDSSTKAPLSASMIKRYAEHHEDLEKLKEFIKANKPELYHDIFKDETKNGYAGYIENGVKQDEFYKYLKNTLSKITGSDYFLDQIEREDFLRKQRTFDNGSIPHQIHLQEMHAILRRQGDYYPFLKENQDRIEKILTFRIPYYVGPLARKNSRFAWAEYHSDEAVTPWNFDQVIDKESSAQAFIEHMTNNDLYLPNEKVLPKHSPLYEKYTVYNELTKIKYVTEIGEAKFFDANLKQEIFDGLFKHERKVTKKKLRTFLDKNFDEFRIVDIQGLDKETETFNASYATYQDLLKVIKDKVFMDNPENAEILENIVLTLTLFEDREMIKQRLAKYADVFDKKVIDQLARRHYTGWGRLSAKLLNGIRDKQSCKTIMDYLIDDAQSNRNLMQLITDDNLTFKDDIVKAQYVDNSDDLHQVVQSLAGSPAIKKGILQSLKIVDELVKVMGKEPEQIVVEMARENQTTAKGRRNSQQRYKRLKEAIKSLDRDLNHKILKEHPTDNQALQNNRLFLYYLQNGRDMYTGESLDINRLSDYDIDHVIPQAFIKDNSIDNRVLTSSKANRGKSDDVPSEDVVNRMRPFWNKLLSSGLISQRKYNNLTKKELTLDDKAGFIKRQLVETRQITKHVARMLDERFNKEFDDNNKRIRRVKIVTLKSNLVSSFRKEFELYKVREINDYHHAHDAYLNAVVVKALLVKYPKLEPEFVYGEYPKYNSYRERKTATQKMFFYSNIMNMFKSKVKLADDQIVERPMIEVNDETGEIAWDKTKHITTVKKVLSYPQVNIVKKVEEQTIGQNGGLFDDNPKSPLEVIPSKLVPLKKALNPEKYGGYQKPTTAYPILLIVDTKQLIPISVMDKKRFEQNPVKFLKDKGYQQIEKNNFVKLPKYTLVDIGNGIKRLWASSKEVHKGNQLVVSKKSQDLLYHAHHLDNDYSNEYVKNHYQQFDILFNEITSFSKKCKLGKEHIQKIEEAYSKERDFASIEELADGFIKLLGFTQLGATSPFSFLGIKLNQKQYTGKKDYLLPCMEATLIHQSITGLYETRIDLSKLGGD

SEQ ID NO: 706 - protein, 1355 aa, Streptococcus mutans; identical to SEQ ID NO: 705

SEQ ID NO: 707 - protein, 1345 aa, Streptococcus mutans
MKKPYSIGLDIGTNSVGWAVVTDDYKVPAKKMKVLGNTDKSHIKKNLLGALLFDSGNTAEDRRLKRTARRRYTRRRNRILYLQEIFSEEMDKVDDSFFHRLEDSFLVTEDKRGERHPIFGNLEEEVKYHENFPTIYHLRQYLADNPEKVDLRLVYLALAHIIKFRGHFLIEGKFDTRNNDVQRLFQEFLAVYDNTFENSSLQEQNVQVEEILTDKISKSAKKDRVLKLFPNEKSNGRFAEFLKLIVGNQADFKKHFELEEKAPLQFSKDTYEEELEVLLAQIGDNYAELFLSAKKLYDSILLSGILTVTDVSTKAPLSASMIQRYNEHQMDLAQLKQFIRQKLSDKYNEVFSDVSKDGYAGYIDGKTNQEAFYKYLKGLLNKIEGSGYFLDKIEREDFLRKQRTFDNGSIPHQIHLQEMRAIIRRQAEFYPFLADNQDRIEKILTFRIPYYVGPLARGKSDFAWLSRKSADKITPWNFDEIVDKESSAEAFINRMTNYDLYLPNQKVLPKHSLLYEKFTVYNELTKVKYKTEQGKTAFFDANMKQEIFDGVFKVYRKVTKDKLMDFLEKEFDEFRIVDLTGLDKENKVFNASYGTYHDLCKILDKDFLDNSKNEKILEDIVLTLTLFEDREMIRKRLENYSDLLTKEQVKKLERRHYTGWGRLSAELIHGIRNKESRKTILDYLIDDGNSNRNFMQLINDDALSFKEEIAKAQVIGETDNLNQVVSDIAGSPAIKKGILQSLKIVDELVKIMGHQPENIVVEMARENQFTKQGRRNSQQRLKGLTDSIKEFGSQILKEHPVENSQLQNDRLFLYYLQNGRDMYTGEELDIDYLSQYDIDHIIPQAFIKDNSIDNRVLTSSKENRGKSDDVPSKDVVRKMKSYWSKLLSAKLITQRKFDNLTKAERGGLTDDDKAGFIKRQLVETRQITKHVARILDERFYTETDENNKKIRQVKIVTLKSNLVSNFRKEFELYKVREINDYHHAHDAYLNAVIGKALLGVYPQLEPEFVYGDYPHFHGHKENKATAKKFFYSNIMNFFKKDDVRTDKNGEIIWKKDEHISNIKKVLSYPQVNIVKKVEEQTGGFSKESILPKGNSDKLIPRKTKKFYWDTKKYGGFDSPIVAYSILVIADIEKGKSKKLKTVKALVGVTIMEKMTFERDPVAFLERKGYRNVQEENIIKLPKYSLFKLENGRKRLLASARELQKGNEIVLPNHLGTLLYHAKNIHKVDEPKHLDYVDKHKDEFKELLDVVSNFSKKYTLAEGNLEKIKELYAQNNGEDLKELASSFINLLTFTAIGAPATFKFFDKNIDRKRYTSTTEILNATLIHQSITGLYETRIDLSKLGGD

SEQ ID NO: 708 - protein, 1345 aa, Streptococcus mutans; identical to SEQ ID NO: 707

SEQ ID NO: 709 - protein, 1345 aa, Streptococcus mutans
MKKPYSIGLDIGTNSVGWAVVTDDYKVPAKKMKVLGNTDKSHIKKNLLGALLFDSGNTAEDRRLKRTARRRYTRRRNRILYLQEIFSEEMGKVDDSFFHRLDESFLTDDDKNFDSHPIFGNKAEEDAYHQKFPTIYHLRKHLADSTEKADLRLVYLALAHMIKFRGHFLIEGELNAENTDVQKLFADFVGVYDRTFDDSHLSEITVDASSILTEKISKSRRLEKLINNYPKEKKNTLFGNLIALSLGLQPNFKTNFKLSEDAKLQFSKDTYEEELEVLLAQIGDNYAELFLSAKKLYDSILLSGILTVTDVSTKAPLSASMIQRYNEHQMDLAQLKQFIRQKLSDKYNEVFSDVSKDGYAGYIDGKTNQEAFYKYLKGLLNKIEGSGYFLDKIEREDFLRKQRTFDNGSIPHQIHLQEMRAIIRRQAEFYPFLADNQDRIEKILTFRIPYYVGPLARGKSDFAWLSRKSADKITPWNFDEIVDKESSVEAFINRMTNYDLYLPNQKVLPKHSLLYEKFTVYNELTKVKYKTEQGKTAFFDANMKQEIFDGVFKVYRKVTKDKLMDFLEKEFDEFRIVDLTGLDKENKAFNASYGTYHDLRKILDKDFLDNSKNEKILEDIVLTLTLFEDREMIRKRLKNYSDLLTKEQLKKLERRHYTGWGRLSAELIHGIRNKESRKTILDYLIDDGNSNRNFMQLINDDALSFKEEIAKAQVIGETDNLNQVVSDIAGSPAIKKGILQSLKIVDELVKIMGHQPENIVVEMARENQFTNQGRRNSQQRLKGLTDSIKEFGSQILKEHPVENSQLQNDRLFLYYLQNGRDMYTGEELDIDYLSQYDIDHIIPQAFIKDNSIDNRVLTSSKENRGKSDDVPSKDVVRKMKSYWSKLLSAKLITQRKFDNLTKGERGGLTDDDKAGFIKRQLVETRQITKHVARILDERFNTETDENNKKIRQVKIVTLKSNLVSNFRKEFELYKVREINDYHHAHDAYLNAVIGKALLGVYPQLEPEFVYGDYPHFHGHKENKATAKKFFYSNIMNFFKKDDVRTDKNGEIIWKKDEYISNIKKVLSYPQVNIVKKVEEQTGGFSKESILPKGDSDKLIPRKTKKFYWDTKKYGGFDSPIVAYSILVIADIEKGKSKKLKTVKALVGVTIMEKMTFERDPVAFLERKGYRNVQEENIIKLPKYSLFKLENGRKRLLASARELQKGNEIVLPNHLGTLLYHAKNIHKVDEPKHLDYVDKHKDEFKELLDVVSNFSKKYTLAEGNLEKIKELYAQNNGEDLKELASSFINLLTFTAIGAPATFKFFDKNIDRKRYTSTTEILNATLIHQSITGLYETRIDLSKLGGD

SEQ ID NO: 710 - protein, 1345 aa, Streptococcus mutans
MKKPYSIGLDIGTNSVGWAVVTDDYKVPAKKMKVLGNTDKSHIKKNLLGALLFDSGNTAEDRRLKRTARRRYTRRRNRILYLQEIFSEEMGKVDDSFFHRLDESFLTDDDKNFDSYPIFGNKAEEDAYHQKFPTIYHLRKHLADSTEKADLRLVYLALAHMIKFRGHFLIEGELNAENTDVQKLFADFVGVYDRTFDDSHLSEITVDASSILTEKISKSRRLEKLINNYPKEKKNTLFRNLVALSLGLQPNFKTNFKLSEDAKLQFSKDTYEEDLEELLGKIGDDYADLFTLAKNLYDAILLSGILTADDSSTKAPLSASMIKRYAEHHEDLEKLKEFIKANKPELYHDIFKDETKNGYAGYIENGVKQDEFYKYLKNTLSKIAGSDYFLDKIEREDFLRKQRTFDNGSIPHQIHLQEMHAILRRQGDYYPFLKENQDRIEKILTFRIPYYVGPLARGKSDFAWLSRKSADKITPWNFDEIVDKESSVEAFINRMTNYDLYLPNQKVLPKHSLLYEKFTVYNELTKVKYKTEQGKTAFFDANMKQEIFDGVFKVYRKVTKDKLMDFLEKEFDEFRIVDLTGLDKENKAFNASYGTYHDLRKILDKDFLDNSKNEKILEDIVLTLTLFEDREMIRKRLKNYSDLLTKEQLKKLERRHYTGWGRLSAELIHGIRNKESRKTILDYLIDDGNSNRNFMQLINDDALSFKEEIAKAQVIGETDNLNQVVSDIAGSPAIKKGILQSLKIVDELVKIMGHQPENIVVEMARENQFTNQGRRNSQQRLKGLTDSIKEFGSQILKEHPVENSQLQNDRLFLYYLQNGRDMYTGEELDIDYLSQYDIDHIIPQAFIKDNSIDNRVLTSSKENRGKSDDVPSKDVVRKMKSYWSKLLSAKLITQRKFDNLTKGERGGLTDDDKAGFIKRQLVETRQITKHVARILDERFNTETDENNKKIRQVKIVTLKSNLVSNFRKEFELYKVREINDYHHAHDAYLNAVIGKALLGVYPQLEPEFVYGDYPHFHGHKENKATAKKFFYSNIMNFFKKDDVRTDKNGEIIWKKDEYISNIKKVLSYPQVNIVKKVEEQTGGFSKESILPKGDSDKLIPRKTKKFYWDTKKYGGFDSPIVAYSILVIADIEKGKSKKLKTVKALVGVTIMEKMTFERDPVAFLERKGYRNVQEENIIKLPKYSLFKLENGRKRLLASARELQKGNEIVLPNHLGTLLYHAKNIHKVDEPKHLDYVDKHKDEFKELLDVVSNFSKKYTLAEGNLEKIKELYAQNNGEDLKELASSFINLLTFTAIGAPATFKFFDKNIDRKRYTSTTEILNATLIHQSITGLYETRIDLSKLGGD

SEQ ID NO: 711 - protein, 1345 aa, Streptococcus mutans; identical to SEQ ID NO: 710

SEQ ID NO: 712 - protein, 1345 aa, Streptococcus mutans
MKKPYSIGLDIGTNSVGWAVVTDDYKVPAKKMKVLGNTDKSHIKKNLLGALLFDSGNTAEDRRLKRTARRRYTRRRNRILYLQEIFSEEMGKVDDSFFHRLEDSFLVTEDKRGERHPIFGNLEEEVKYHENFPTIYHLRQYLADNPEKTDLRLVYLALAHIIKFGGHFLIEGKFDTRNNDVQRLFQEFLAVYDNTFENSSLQEQNVQVEEILTDKISKSAKKDRVLKLFPNEKSNGRFAEFLKLIVGNQADFKKHFELEEKAPLQFSKDIYEEELEVLLAQIGDNYAELFLSAKKLYDSILLSGILTVTDVSTKAPLSASMIQRYNEHQMDLAQLKQFIRQKLSDKYNEVFSDVSKDGYAGYIDGKTNQEAFYKYLKGLLNKIEGSGYFLDKIEREDFLRKQRTFDNGSIPHQIHLQEMRAIIRRQAEFYPFLADNQDRIEKILTFRIPYYVGPLARGKSDFAWLSRKSADKITPWNFDEIVDKESSVEAFINRMTNYDLYLPNQKVLPKHSLLYEKFTVYNELTKVKYKTEQGKTAFFDANMKQEIFDGVFKVYRKVTKDKLMDFLEKEFDEFRIVDLTGLDKENKAFNASYGTYHDLRKILDKDFLDNSKNEKILEDIVLTLTLFEDREMIRKRLKNYSDLLTKEQLKKLERRHYTGWGRLSAELIHGIRNKESRKTILDYLIDDGNSNRNFMQLINDDALSFKEEIAKAQVIGETDNLNQVVSDIAGSPAIKKGILQSLKIVDELVKIMGHQPENIVVEMARENQFTNQGRRNSQQRLKGLTDSIKEFGSQILKEHPVENSQLQNDRLFLYYLQNGRDMYTGEELDIDYLSQYDIDHIIPQAFIKDNSIDNRVLTSSKENRGKSDDVPSKNVVRKMKSYWSKLLSAKLITQRKFDNLTKAERGGLTDDDKAGFIKRQLVETRQITKHVARILDERFHTETDENNKKIRQVKIVTLKSNLVSNFRKEFELYKVREINDYHHAHDAYLNAVIGKALLGVYPQLEPEFVYGDYPHFHGHKENKATAKKFFYSNIMNFFKKDDVRTDKNGEIIWKKDEHISNIKKVLSYPQVNIVKKVEEQTGGFSKESILPKGNSDKLIPRKTKKFYWDTKKYGGFDSPIVAYSILVIADIEKGKSKKLKTVKALVGVTIMEKMTFERDPVAFLERKGYRNVQEENIIKLPKYSLFKLENGRKRLLASARELQKGNEIVLPNHLGTLLYHAKNIHKVDEPKHLDYVDKHKDEFKELLDVVSNFSKKYTLAEGNLEKIKELYAQNNGEDLKELASSFINLLTFTAIGAPATFKFFDKNIDRKRYTSTTEILNATLIHQSITGLYETRIDLSKLGGD

SEQ ID NO: 713 - protein, 1345 aa, Streptococcus mutans; identical to SEQ ID NO: 712

SEQ ID NO: 714 - protein, 1345 aa, Streptococcus mutans
MKKPYSIGLDIGTNSVGWAVVTDDYKVPAKKMKVLGNTDKSHIKKNLLGALLFDSGNTAEDRRLKRTARRRYTRRRNRILYLQEIFSEEMGKVDDSFFHRLEDSFLVTEDKRGERHPIFGNLEEEVKYHENFPTIYHLRQYLADNPEKTDLRLVYLALAHIIKFRGHFLIEGKFDTRNNDVQRLFQEFLAVYDNTFENSSLQEQNVQVEEILTDKISKSAKKDRVLKLFPNEKSNGRFAEFLKLIVGNQADFKKHFELEEKAPLQFSKDIYEEELEVLLAQIGDNYAELFLSAKKLYDSILLSGILTVTDVSTKAPLSASMIQRYNEHQMDLAQLKQFIRQKLSDKYNEVFSDVSKDGYAGYIDGKTNQEAFYKYLKGLLNKIEGSGYFLDKIEREDFLRKQRTFDNGSIPHQIHLQEMRAIIRRQAEFYPFLADNQDRIEKILTFRIPYYVGPLARGKSDFAWLSRKSADKITPWNFDEIVDKESSVEAFINRMTNYDLYLPNQKVLPKHSLLYEKFTVYNELTKVKYKTEQGKTAFFDANMKQEIFDGVFKVYRKVTKDKLMDFLEKEFDEFRIVDLTGLDKENKAFNASYGTYHDLRKILDKDFLDNSKNEKILEDIVLTLTLFEDREMIRKRLKNYSDLLTKEQLKKLERRHYTGWGRLSAELIHGIRNKESRKTILDYLIDDGNSNRNFMQLINDDALSFKEEIAKAQVIGETDNLNQVVSDIAGSPAIKKGILQSLKIVDELVKIMGHQPENIVVEMARENQFTNQGRRNSQQRLKGLTDSIKEFGSQILKEHPVENSQLQNDRLFLYYLQNGRDMYTGEELDIDYLSQYDIDHIIPQAFIKDNSIDNRVLTSSKENRGKSDDVPSKNVVRKMKSYWSKLLSAKLITQRKFDNLTKAERGGLTDDDKAGFIKRQLVETRQITKHVARILDERFHTETDENNKKIRQVKIVTLKSNLVSNFRKEFELYKVREINDYHHAHDAYLNAVIGKALLGVYPQLEPEFVYGDYPHFHGHKENKATAKKFFYSNIMNFFKKDDVRTDKNGEIIWKKDEHISNIKKVLSYPQVNIVKKVEEQTGGFSKESILPKGNSDKLIPRKTKKFYWDTKKYGGFDSPIVAYSILVIADIEKGKSKKLKTVKALVGVTIMEKMTFERDPVAFLERKGYRNVQEENIIKLPKYSLFKLENGRKRLLASARELQKGNEIVLPNHLGTLLYHAKNIHKVDEPKHLDYVDKHKDEFKELLDVVSNFSKKYTLAEGNLEKIKELYAQNNGEDLKELASSFINLLTFTAIGAPATFKFFDKNIDRKRYTSTTEILNATLIHQSITGLYETRIDLSKLGGD

SEQ ID NO: 715 - protein, 1345 aa, Streptococcus mutans
MKKPYSIGLDIGTNSVGWAVVTDDYKVPAKKMKVLGNTDKSHIKKNLLGALLFDSGNTAEDRRLKRTARRRYTRRRNRILYLQEIFSEEMGKVDDSFFHRLEDSFLVTEDKRGERHPIFGNLEEEVKYHENFPTIYHLRQYLADNPEKTDLRLVYLALAHIIKFRGHFLIEGKFDTRNNDVQRLFQEFLAVYDNTFENSSLQEQNVQVEEILTDKISKSAKKDRVLKLFPNEKSNGRFAEFLKLIVGNQADFKKHFELEEKAPLQFSKDIYEEELEVLLAQIGDNYAELFLSAKKLYDSILLSGILTVTDVSTKAPLSASMIQRYNEHQMDLAQLKQFIRQKLSDKYNEVFSDVSKDGYAGYIDGKTNQEAFYKYLKGLLNKIEGSGYFLDKIEREDFLRKQRTFDNGSIPHQIHLQEMRAIIRRQAEFYPFLADNQDRIEKILTFRIPYYVGPLARGKSDFAWLSRKSADKITPWNFDEIVDKESSVEAFINRMTNYDLYLPNQKVLPKHSLLYEKFTVYNELTKVKYKTEQGKTAFFDANMKQEIFDGVFKVYRKVTKDKLMDFLEKEFDEFRIVDLTGLDKENKAFNASYGTYHDLRKILDKDFLDNSKNEKILEDIVLTLTLFEDREMIRKRLKNYSDLLTKEQLKKLERRHYTGWGRLSAELIHGIRNKESRKTILDYLIDDGNSNRNFMQLINDDALSFKEEIAKAQVIGETDNLNQVVSDIAGSPAIKKGILQSLKIVDELVKIMGHQPENIVVEMARENQFTNQGRRNSQQRLKGLTDSIKEFGSQILKEHPVENSQLQNDRLFLYYLQNGRDMYTGEELDIDYLSQYDIDHIIPQAFIKDNSIDNRVLTSSKENRGKSDDVPSKDVVRKMKSYWSKLLSAKLITQRKFDNLTKAERGGLTDDDKAGFIKRQLVETRQITKHVARILDERFNTETDENNKKIRQVKIVTLKSNLVSNFRKEFELYKVREINDYHHAHDAYLNAVIGKALLGVYPQLEPEFVYGDYPHFHGHKENKATAKKFFYSNIMNFFKKDDVRTDKNGEIIWKKDEHISNIKKVLSYPQVNIVKKVEEQTGGFSKESILPKGNSYKLIPRKTKKFYWDTKKYGGFDSPIVAYSILVIADIEKGKSKKLKTVKALVGVTIMEKMTFERDPVAFLERKGYRNVQEENIIKLPKYSLFKLENGRKRLLASARELQKGNEIVLPNHLGTLLYHAKNIHKVDEPKHLDYVDKHKDEFKELLDVVSNFSKKYTLAEGNLEKIKELYAQNNGEDLKELASSFINLLTFTAIGAPAAFKFFDKNIDRKRYTSTTEILNATLIHQSITGLYETRIDLSKLGGD

SEQ ID NO: 716 - protein, 1345 aa, Streptococcus mutans
MKKPYSIGLDIGTNSVGWAVVTDDYKVPAKKMKVLGNTDKSHIKKNLLGALLFDSGNTAEDRRLKRTARRRYTRRRNRILYLQEIFSEEMGKVDDSFFHRLEDSFLVTEDKRGERHPIFGNLEEEVKYHENFPTIYHLRQYLADNPEKTDLRLVYLALAHIIKFRGHFLIEGKFDTRNNDVQRLFQEFLAVYDNTFENSSLQEQNVQVEEILTDKISKSAKKDRVLKLFPNEKSNGRFAEFLKLIVGNQADFKKHFELEEKAPLQFSKDIYEEELEVLLAQIGDNYAELFLSAKKLYDSILLSGILTVTDVSTKAPLSASMIQRYNEHQMDLAQLKQFIRQKLSDKYNEVFSDVSKDGYAGYIDGKTNQEAFYKYLKGLLNKIEGSGYFLDKIEREDFLRKQRTFDNGSIPHQIHLQEMRAIIRRQAEFYPFLADNQDRIEKILTFRIPYYVGPLARGKSDFAWLSRKSADKITPWNFDEIVDKESSAEAFINRMTNYDLYLPNQKVLPKHSLLYEKFTVYNELTKVKYKTEQGKTAFFDANMKQEIFDGVFKVYRKVTKDKLMDFLEKEFDEFRIVDLTGLDKENKAFNASYGTYHDLRKILDKDFLDNSKNEKILEDIVLTLTLFEDREMIRKRLKNYSDLLTKEQLKKLERRHYTGWGRLSAELIHGIRNKESRKTILDYLIDDGNSNRNFMQLINDDALSFKEEIAKAQVIGETDNLNQVVSDIAGSLAIKKGILQSLKIVDELVKIMGHQPENIVVEMARENQFTNQGRRNSQQRLKGLTDSIKEFGSQILKEHPVENSQLQNDRLFLYYLQNGRDMYTGEELDIDYLSQYDIDHIIPQAFIKDNSIDNRVLTSSKENRGKSDDVPSKDVVRKMKSYWSKLLSAKLITQRKFDNLTKGERGGLTDDDKAGFIKRQLVETRQITKHVARILDERFNTETDENNKKIRQVKIVTLKSNLVSNFRKEFELYKVREINDYHHAHDAYLNAVIGKALLGVYPQLEPEFVYGDYPHFHGHKENKATAKKFFYSNIMNFFKKDDVRTDKNGEIIWKKDEYISNIKKVLSYPQVNIVKKVEEQTGGFFKESILPKGDSDKLIPRKTKKFYWDTKKYGGFDSPIVAYSILVIADIEKGKSKKLKTVKALVGVTIMEKMTFERDPVAFLERKGYRNVQEENIIKLPKYSLFKLENGRKRLLASARELQKGNEIVLPNHLGTLLYHAKNIHKVDEPKHLDYVDKHKDEFKELLDVVSNFSKKYTLAEGNLEKIKELYAQNNGEDLKELASSFINLLTFTAIGAPATFKFFDKNIDRKRYTSTTEILNATLIHQSITGLYETRIDLSKLGGD

SEQ ID NO: 717 - protein, 1345 aa, Streptococcus mutans
MKKPYSIGLDIGTNSVGWAVVTDDYKVPAKKMKVLGNTDKSHIKKNLLGALLFDSGNTAEDRRLKRTARRRYTRRRNRILYLQEIFSEEMGKVDDSFFHRLEDSFLVTEDKRGERHPIFGNLEEEVKYHENFPTIYHLRQYLADNPEKTDLRLVYLALAHIIKFRGHFLIEGKFDTRNNDVQRLFQEFLAVYDNTFENSSLQEQNVQVEEILTDKISKSAKKDRVLKLFPNEKSNGRFAEFLKLIVGNQADFKKHFELEEKAPLQFSKDIYEEELEVLLAQIGDNYAELFLSAKKLYDSILLSGILTVTDVSTKAPLSASMIQRYNEHQMDLAQLKQFIRQKLSDKYNEVFSDVSKDGYAGYIDGKTNQEAFYKYLKGLLNKIEGSGYFLDKIEREDFLRKQRTFDNGSIPHQIHLQEMRAIIRRQAEFYPFLADNQDRIEKILTFRIPYYVGPLARGKSDFAWLSRKSADKITPWNFDEIVDKESSVEAFINRMTNYDLYLPNQKVLPKHSLLYEKFTVYNELTKVKYKTEQGKTAFFDANMKQEIFDGVFKVYRKVTKDKLMDFLEKEFDEFRIVDLTGLDKENKAFNASYGTYHDLRKILDKDFLDNSKNEKILEDIVLTLTLFEDREMIRKRLKNYSDLLTKEQLKKLERRHYTGWGRLSAELIHGIRNKESRKTILDYLIDDGNSNRNFMQLINDDALSFKEEIAKAQVIGETDNLNQVVSDIAGSPAIKKGILQSLKIVDELVKIMGHQPENIVVEMARENQFTNQGRRNSQQRLKGLTDSIKEFGSQILKEHPVENSQLQNDRLFLYYLQNGRDMYTGEELDIDYLSQYDIDHIIPQAFIKDNSIDNRVLTSSKENRGKSDDVPSKDVVRKMKSYWSKLLSAKLITQRKFDNLTKAERGGLTDDDKAGFIKRQLVETRQITKHVARILDERFNTETDENNKKIRQVKIVTLKSNLVSNFRKEFELYKVREINDYHHAHDAYLNAVIGKALLGVYPQLEPEFVYGDYPHFHGHKENKATAKKFFYSNIMNFFKKDDVRTDKNGEIIWKKDEHISNIKKVLSYPQVNIVKKVEEQTGGFSKESILPKGNSDKLIPRKTKKFYWDTKKYGGFDSPIVAYSILVIADIEKGKSKKLKTVKALVGVTIMEKMTFERDPVAFLERKGYRNVQEENIIKLPKYSLFKLENGRKRLLASARELQKGNEIVLPNHLGTLLYHAKNIHKVDEPKHLDYVDKHKDEFKELLDVVSNFSKKYTLAEGNLEKIKELYAQNNGEDLKELASSFINLLTFTAIGAPATFKFFDKNIDRKRYTSTTEILNATLIHQSITGLYETRIDLNKLGGD

SEQ ID NO: 718 - protein, 1345 aa, Streptococcus mutans; identical to SEQ ID NO: 717

SEQ ID NO: 719 - protein, 1345 aa, Streptococcus mutans; identical to SEQ ID NO: 714

SEQ ID NO: 720 - protein, 1345 aa, Streptococcus mutans; identical to SEQ ID NO: 715

SEQ ID NO: 721 - protein, 1345 aa, Streptococcus mutans; identical to SEQ ID NO: 716

SEQ ID NO: 722 - protein, 1345 aa, Streptococcus mutans
MKKPYSIGLDIGTNSVGWAVVTDDYKVPAKKMKVLGNTDKSHIKKNLLGALLFDSGNTAEDRRLKRTARRRYTRRRNRILYLQEIFSEEMGKVDDSFFHRLEDSFLVTEDKRGERHPIFGNLEEEVKYHENFPTIYHLRQYLADNPEKVDLRLVYLALAHIIKFRGHFLIEGKFDTRNNDVQKLFQEFLAVYDNTFENSSLQEQNVQVEEILTDKISKSAKKDRVLKLFPNEKSNGRFAEFLKLIVGNQADFKKHFELEEKAPLQLSKDTYEEELEVLLAQIGDNYAELFLSAKKLYDSILLSGILTVTDVSTKAPLSASMIQRYNEHQMDLAQLKQFIRQKLSDKYNEVFSDVSKDGYAGYIDGKTNQEAFYKYLKGLLNKIEGSGYFLDKIEREDFLRKQRTFDNGSIPHQIHLQEMRAIIRRQAEFYPFLADNQDRIEKILTFRIPYYVGPLARGKSDFAWLSRKSADKITPWNFDEIVDKESSVEAFINRMTNYDLYLPNQKVLPKHSLLYEKFTVYNELTKVKYKTEQGKTAFFDANMKQEIFDGVFKVYRKVTKDKLMDFLEKEFDEFRIVDLTGLDKENKAFNASYGTYHDLRKILDKDFLDNSKNEKILEDIVLTLTLFEDREMIRKRLENYSDLLTKEQVKKLERRHYTGWGRLSAELIHGIRNKESRKTLLDYLIDDGNSNRNFMQLINDDALSFKEEIAKAQVIGETDNLNQVVSDIAGSPAIKKGILQSLKIVDELVKIMGHQPENIVVEMARENQFTNQGRRNSQQRLKGLTDSIKEFGSQILKEHPVENSQLQNDRLFLYYLQNGRDMYTGEELDIDYLSQYDIDHIIPQAFIKDNSIDNRVLTSSKENRGKSDDVPSKDVVRKMKSYWSKLLSAKLITQRKFDNLTKAERGGLTDDDKAGFIKRQLVETRQITKHVARILDERFNTETDENNKKIRQVKIVTLKSNLVSNFRKEFELYKVREINDYHHAHDAYLNAVIGKALLGVYPQLEPEFVYGDYPHFHGHKENKATAKKFFYSNIMNFFKKDDVRTDKNGEIIWKKDEYISNIKKVLSYPQVNIVKKVEEQTGGFSKESILPKGNSDKLIPRKTKKFYWDTKKYGGFDSPIVAYSILVIADIEKGKSKKLKTVKALVGVTIMEKMTFERDPIAFLERKGYRNVQEENIIKLPKYSLFKLENGRKRLLASARELQKGNEIVLPNHLGTLLYHAKNIHKVDEPKHLDYVDKHKDEFKELLDVVSNFSKKYTLAEGNLEKIKELYAQNNGEDLKELASSFINLLTFTAIGAPATFKFFDKNIDRKRYTSTTEILNATLIHQSITGLYETRIDLSKLGGD

SEQ ID NO: 723 - protein, 1345 aa, Streptococcus mutans; identical to SEQ ID NO: 722

SEQ ID NO: 724 - protein, 1345 aa, Streptococcus mutans
MKKPYSIGLDIGTNSVGWAVVTDDYKVPAKKMKVLGNTDKSHIKKNLLGALLFDSGNTAEDRRLKRTARRRYTRRRNRILYLQEIFSEEMGKVDDSFFHRLEDSFLVTEDKRGERHPIFGNLEEEVKYHENFPTIYHLRQYLADNPEKVDLRLVYLALAHIIKFRGHFLIEGKFDTRNNDVQRLFQEFLAVYDNTFENSSLQEQNVQVEEILTDKISKSAKKDRVLKLFPNEKSNGRFAEFLKLIVGNQADFKKHFELEEKAPLQFSKDTYEEDLEELLGKIGDDYADLFTLAKNLYDAILLSGILTADDSSTKAPLSASMIQRYNEHQMDLAQLKQFIRQKLSDKYNEVFSDVSKDGYAGYIDGKTNQEAFYKYLKGLLNKIEGSGYFLDKIEREDFLRKQRTFDNGSIPHQIHLQEMRAIIRRQAEFYPFLADNQDRIEKILTFRIPYYVGPLARGKSDFAWLSRKSADKITPWNFDEIVDKESSAEAFINRMTNYDLYLPNQKVLPKHSLLYEKFTVYNELTKVKYKTEQGKTAFFDANMKQEIFDGVFKVYRKVTKDKLMDFLEKEFDEFRIVDLTGLDKENKVFNASYGTYHDLCKILDKDFLDNSKNEKILEDIVLTLTLFEDREMIRKRLENYSDLLTKEQVKKLERRHYTGWGRLSAELIHGIRNKESRKTILDYLIDDGNSNRNFMQLINDDALSFKEEIAKAQVIGETDNLNQVVSDIAGSPAIKKGILQSLKIVDELVKIMGHQPENIVVEMARENQFTNQGRRNSQQRLKGLTDSIKEFGSQILKEHPVENSQLQNDRLFLYYLQNGRDMYTGEELDIDYLSQYDIDHIIPQAFIKDNSIDNRVLTSSKENRGKSDDVPSKDVVRKMKSYWSKLLSAKLITQRKFDNLTKAERGGLTDDDKAGFIKRQLVETRQITKHVARILDERFYTETDENNKKIRQVKIVTLKSNLVSNFRKEFELYKVREINDYHHAHDAYLNAVIGKALLGVYPQLEPEFVYGDYPHFHGHKENKATAKKFFYSNIMNFFKKDDVRTDKNGEIIWKKDEHISNIKKVLSYPQVNIVKKVEEQTGGFSKESILPKGNSDKLIPRKTKKFYWDTKKYGGFDSPIVAYSILVIADIEKGKSKKLKTVKALVGVTIMEKMTFERDPVAFLERKGYRNVQEENIIKLPKYSLFKLENGRKRLLASARELQKGNEIVLPNHLGTLLYHAKNIHKVDEPKHLDYVDKHKDEFKELLDVVSNFSKKYTLAEGNLEKIKELYAQNNGEDLKELASSFINLLTFTAIGAPATFKFFDKNIDRKRYTSTTEILNATLIHQSITGLYETRIDLSKLGGD

SEQ ID NO: 725 - protein, 1345 aa, Streptococcus mutans
MKKPYSIGLDIGTNSVGWAVVTDDYKVPAKKMKVLGNTDKSHIKKNLLGALLFDSGNTAEDRRLKRTARRRYTRRRNRILYLQEIFSEEMGKVDDSFFHRLEDSFLVTEDKRGERHPIFGNLEEEVKYHENFPTIYHLRQYLADNPEKVDLRLVYLALAHIIKFRGHFLIEGKFDTRNNDVQRLFQEFLAVYDNTFENSSLQEQNVQVEEILTDKISKSAKKDRVLKLFPNEKSNGRFAEFLKLIVGNQADFKKHFELEEKAPLQFSKDTYEEDLEELLGKIGDDYADLFTLAKNLYDAILLSGILTADDSSTKAPLSASMIQRYNEHQMDLAQLKQFIRQKLSDKYNEVFSDVSKDGYAGYIDGKTNQEAFYKYLKGLLNKIEGSGYFLDKIEREDFLRKQRTFDNGSIPHQIHLQEMRAIIRRQAEFYPFLADNQDRIEKILTFRIPYYVGPLARGKSDFAWLSRKSADKITPWNFDEIVDKESSAEAFINRMTNYDLYLPNQKVLPKHSLLYEKFTVYNELTKVKYKTEQGKTAFFDANMKQEIFDGVFKVYRKVTKDKLMDFLEKEFDEFRIVDLTGLDKENKVFNASYGTYHDLCKILDKDFLDNSKNEKILEDIVLTLTLFEDREMIRKRLENYSDLLTKEQVKKLERRHYTGWGRLSAELIHGIRNKESRKTILDYLIDDGNSNRNFMQLINDDALSFKEEIAKAQVIGETDNLNQVVSDIAGSPAIKKGILQSLKIVDELVKIMGHQPENIVVEMARENQFTNQGRRNSQQRLKGLTDSIKEFGSQILKEHPVENSQLQNDRLFLYYLQNGRDMYTGEELDIDYLSQYDIDHIIPQAFIKDNSIDNRVLTSSKENRGKSDDVPSKDVVRKMKPYWSKLLSAKLITQRKFDNLTKAERGGLTDDDKAGFIKRQLVETRQITKHVARILDERFNTETDENNKKIRQVKIVTLKSNLVSNFRKEFELYKVREINDYHHAHDAYLNAVIGKALLGVYPQLEPEFVYGDYPHFHGHEENKATAKKFFYSNIMNFFKKDDVRTDKNGEIIWKKDEHISNIKKVLSYPQVNIVKKVEEQTGGFSKESILPKGNSDKLIPRKTKKFYWDTKKYGGFDSPIVAYSILVIADIEKGKSKKLKTVKALVGVTIMEKMTFERDPVAFLERKGYRNVQEENIIKLPKYSLFKLENGRKRLLASARELQKGNEIVLPNHLGTLLYHAKNIHKVDEPKHLDYVDKHKDEFKELLDVVSNFSKKYTLAEGNLEKIKELYAQNNGEDLKELASSFINLLTFTAIGAPATFKFFDKNIDRKRYTSTTEILNATLIHQSITGLYETRIDLSKLGGD

SEQ ID NO: 726 - protein, 1345 aa, Streptococcus mutans
MKKPYSIGLDIGTNSVGWAVVTDDYKVPAKKMKVLGNTDKSHIKKNLLGALLFDSGNTAEDRRLKRTARRRYTRRRNRILYLQEIFSEEMGKVDDSFFHRLEDSFLVTEDKRGERHPIFGNLEEEVKYHENFPTIYHLRQYLADNPEKVDLRLVYLALAHIIKFRGHFLIEGKFDTRNNDVQRLFQEFLAVYDNTFENSSLQEQNVQVEEILTDKISKSAKKDRVLKLFPNEKSNGRFAEFLKLIVGNQADFKKHFELEEKAPLQFSKDTYEEELEVLLAQIGDNYAELFLSAKKLYDSILLSGILTVTDVSTKAPLSASMIQRYNEHQMDLAQLKQFIRQKLSDKYNEVFSDVSKDGYAGYIDGKTNQEAFYKYLKGLLNKIEGSGYFLDKIEREDFLRKQRTFDNGSIPHQIHLQEMRAIIRRQAEFYPFLADNQDRIEKILTFRIPYYVGPLARGKSDFAWLSRKSADKITPWNFDEIVDKESSAEAFINRMTNYDLYLPNQKVLPKHSLLYEKFTVYNELTKVKYKTEQGKTAFFDANMKQEIFDGVFKVYRKVTKDKLMDFLEKEFDEFRIVDLTGLDKENKVFNASYGTYHDLCKILDKDFLDNSKNEKILEDIVLTLTLFEDREMIRKRLENYSDLLTKEQVKKLERRHYTGWGRLSAELIHGIRNKESRKTILDYLIDDGNSNRNFMQLINDDALSFKEEIAKAQVIGETDNLNQVVSDIAGSPAIKKGILQSLKIVDELVKIMGHQPENIVVEMARENQFTKQGRRNSQQRLKGLTDSIKEFGSQILKEHPVENSQLQNDRLFLYYLQNGRDMYTGEELDIDYLSQYDIDHIIPQAFIKDNSIDNRVLTSSKENRGKSDDVPSKDVVRKMKSYWSKLLSAKLITQRKFDNLTKAERGGLTDDDKAGFIKRQLVETRQITKHVARILDERFYTETDENNKKIRQVKIVTLKSNLVSNFRKEFELYKVREINDYHHAHDAYLNAVIGKALLGVYPQLEPEFVYGDYPHFHGHKENKATAKKFFYSNIMNFFKKDDVRTDKNGEIIWKKDEHISNIKKVLSYPQVNIVKKVEEQTGGFSKESILPKGNSDKLIPRKTKKFYWDTKKYGGFDSPIVAYSILVIADIEKGKSKKLKTVKALVGVTIMEKMTFERDPVAFLERKGYRNVQEENIIKLPKYSLFKLENGRKRLLASARELQKGNEIVLPNHLGTLLYHAKNIHKVDEPKHLDYVDKHKDEFKELLDVVSNFSKKYTLAEGNLEKIKELYAQNNGEDLKELASSFINLLTFTAIGAPATFKFFDKNIDRKRYTSTTEILNATLIHQSITGLYETRIDLSKLGGD

SEQ ID NO: 727 - protein, 1345 aa, Streptococcus mutans
MKKPYSIGLDIGTNSVGWAVVTDDYKVPAKKMKVLGNTDKSHIKKNLLGALLFDSGNTAEDRRLKRTARRRYTRRRNRILYLQEIFSEEMGKVDDSFFHRLEDSFLVTEDKRGERHPIFGNLEEEVKYHENFPTIYHLRQYLADNPEKVDLRLVYLALAHIIKFRGHFLIEGKFDTRNNDVQRLFQEFLAVYDNTFENSSLQEQNVQVEEILTDKISKSAKKDRVLKLFPNEKSNGRFAEFLKLIVGNQADFKKHFELEEKAPLQFSKDTYEEELEVLLAQIGDNYAELFLSAKKLYDSILLSGILTVTDVSTKAPLSASMIQRYNEHQMDLAQLKQFIRQKLSDKYNEVFSDVSKDGYAGYIDGKTNQEAFYKYLKGLLNKIEGSGYFLDKIEREDFLRKQRTFDNGSIPHQIHLQEMRAIIRRQAEFYPFLADNQDRIEKILTFRIPYYVGPLARGKSDFAWLSRKSADKITPWNFDEIVDKESSAEAFINRMTNYDLYLPNQKVLPKHSLLYEKFTVYNELTKVKYKTEQGKTAFFDANMKQEIFDGVFKVYRKVTKDKLMDFLEKEFDEFRIVDLTGLDKENKVFNASYGTYHDLCKILDKDFLDNSKNEKILEDIVLTLTLFEDREMIRKRLENYSDLLTKEQVKKLERRHYTGWGRLSAELIHGIRNKESRKTILDYLIDDGNSNRNFMQLINDDALSFKEEIAKAQVIGETDNLNQVVSDIAGSPAIKKGILQSLKIVDELVKIMGHQPENIVVEMARENQFTKQGRRNSQQRLKGLTDSIKEFGSQILKEHPVENSQLQNDRLFLYYLQNGRDMYTGEELDIDYLSQYDIDHIIPQAFIKDNSIDNRVLTSSKENRGKSDDVPSKDVVRKMKSYWSKLLSAKLITQRKFDNLTKAERGGLTDDDKAGFIKRQLVETRQITKHVARILDERFYTETDENNKKIRQVKIVTLKSNLVSNFRKEFELYKVREINDYHHAHDAYLNAVIGKALLGVYPQLEPEFVYGDYPHFHGHKENKATAKKFFYSNIMNFFKKDDVRTDRNGEIIWKKDEHISNIKKVLSYPQVNIVKKVEEQTGGFSKESILPKGNSDKLIPRKTKKFYWDTKKYGGFDSPIVAYSILVIADIEKGKSKKLKTVKALVGVTIMEKMTFERDPVAFLERKGYRNVQEENIIKLPKYSLFKLENGRKRLLASARELQKGNEIVLPNHLGTLLYHAKNIHKVDEPKHLDYVDKHKDEFKELLDVVSNFSKKYTLAEGNLEKIKELYAQNNGEDLKELASSFINLLTFTAIGAPATFKFFDKNIDRKRYTSTTEILNATLIHQSITGLYETRIDLSKLGGD

SEQ ID NO: 728 - protein, 1345 aa, Streptococcus mutans
MKKPYSIGLDIGTNSVGWAVVTDDYKVPAKKMKVLGNTDKSHIKKNLLGALLFDSGNTAEDRRLKRTARRRYTRRRNRILYLQEIFSEEMGKVDDSFFHRLEDSFLVTEDKRGERHPIFGNLEEEVKYHENFPTIYHLRQYLADNPEKVDLRLVYLALAHIIKFRGHFLIEGKFDTRNNDVQRLFQEFLAVYDNTFENSSLQEQNVQVEEILTDKISKSAKKDRVLKLFPNEKSNGRFAEFLKLIVGNQADFKKHFELEEKAPLQFSKDTYEEELEVLLAQIGDNYAELFLSAKKLYDSILLSGILTVTDVSTKAPLSASMIQRYNEHQMDLAQLKQFIRQKLSDKYNEVFSDVSKDGYAGYIDGKTNQEAFYKYLKGLLNKIEGSGYFLDKIEREDFLRKQRTFDNGSIPHQIHLQEMRAIIRRQAEFYPFLADNQDRIEKILTFRIPYYVGPLARGKSDFAWLSRKSADKITPWNFDEIVDKESSAEAFINRMTNYDLYLPNQKVLPKHSLLYEKFTVYNELTKVKYKTEQGKTAFFDANMKQEIFDGVFKVYRKVTKDKLMDFLEKEFDEFRIVDLTGLDKENKVFNASYGTYHDLCKILDKDFLDNSKNEKILEDIVLTLTLFEDREMIRKRLENYSDLLTKEQVKKLERRHYTGWGRLSAELIHGIRNKESRKTILDYLIDDGNSNRNFMQLINDDALSFKEEIAKAQVIGETDNLNQVVSDIAGSPAIKKGILQSLKIVDELVKIMGHQPENIVVEMARENQFTNQGRQNSQQRLKGLTDSIKEFGSQILKEHPVENSQLQNDRLFLYYLQNGRDMYTGEELDIDYLSQYDIDHIIPQAFIKDNSIDNRVLTSSKENRGKSDDVPSEDVVRKMKSYWSKLLSAKLITQRKFDNLTKAERGGLTDDDKAGFIKRQLVETRQITKHVARILDERFYTETDENNKKIRQVKIVTLKSNLVSNFRKEFELYKVREINDYHHAHDAYLNAVIGKALLGVYPQLEPEFVYGDYPHFHGHKENKATAKKFFYSNIMNFFKKDDVRTDKNGEIIWKKDEHISNIKKVLSYPQVNIVKKVEEQTGGFSKESILPKGNSDKLIPRKTKKFYWDTKKYGGFDSPIVAYSILVIADIEKGKSKKLKTVKALVGVTIMEKMTFERDPVAFLERKGYRNVQEENIIKLPKYSLFKLENGRKRLLASARELQKGNEIVLPNHLGTLLYHAKNIHKVDEPKHLDYVDKHKDEFKELLDVVSNFSKKYTLAEGNLEKIKELYAQNNGEDLKELASSFINLLTFTAIGAPATFKFFDKNIDRKRYTSTTEILNATLIHQSITGLYETRIDLSKLGGD

SEQ ID NO: 729 - protein, 1345 aa, Streptococcus mutans; identical to SEQ ID NO: 728

SEQ ID NO: 730 - protein, 1345 aa, Streptococcus mutans; identical to SEQ ID NO: 724

SEQ ID NO: 731 - protein, 1345 aa, Streptococcus mutans; identical to SEQ ID NO: 725

SEQ ID NO: 732 - protein, 1345 aa, Streptococcus mutans; identical to SEQ ID NO: 726

SEQ ID NO: 733 - protein, 1345 aa, Streptococcus mutans; identical to SEQ ID NO: 727

SEQ ID NO: 734 - protein, 1345 aa, Streptococcus mutans; identical to SEQ ID NO: 726

SEQ ID NO: 735 - protein, 1345 aa, Streptococcus mutans; identical to SEQ ID NO: 726

SEQ ID NO: 736 - protein, 1345 aa, Streptococcus mutans; identical to SEQ ID NO: 726

SEQ ID NO: 737 - protein, 1345 aa, Streptococcus mutans; identical to SEQ ID NO: 727

SEQ ID NO: 738 - protein, 1345 aa, Streptococcus mutans
MKKPYSIGLDIGTNSVGWAVVTDDYKVPAKKMKVLGNTDKSHIKKNLLGALLFDSGNTAEDRRLKRTARRRYTRRRNRILYLQEIFSEEMGKVNDSFFHRLEDSFLVTEDKRGERHPIFGNLEEEVKYHENFPTIYHLRQYLADNPEKVDLRLVYLALAHIIKFRGHFLIEGKFDTRNNDVQRLFQEFLAVYDNTFENSSLQEQNVQVEEILTDKISKSAKKDRVLKLFPNEKSNGRFAEFLKLIVGNQADFKKHFELEEKAPLQFSKDTYEEELEVLLAQIGDNYAELFLSAKKLYDSILLSGILTVTDVSTKAPLSASMIQRYNEHQMDLAQLKQFIRQKLSDKYNEVFSDVSKDGYAGYIDGKTNQEAFYKYLKGLLNKIEGSGYFLDKIEREDFLRKQRTFDNGSIPHQIHLQEMRAIIRRQAEFYPFLADNQDRIEKILTFRIPYYVGPLARGKSDFAWLSRKSADKITPWNFDEIVDKESSAEAFINRMTNYDLYLPNQKVLPKHSLLYEKFTVYNELTKVKYKTEQGKTAFFDANMKQEIFDGVFKVYRKVTKDKLMDFLEKEFDEFRIVDLTGLDKENKVFNASYGTYHDLCKILDKDFLDNSKNEKILEDIVLTLTLFEDREMIRKRLENYSDLLTKEQVKKLERRHYTGWGRLSAELIHGIRNKESRKTILDYLIDDGNSNRNFMQLINDDALSFKEEIAKAQVIGETDNLNQVVSDIAGSPAIKKGILQSLKIVDELVKIMGHQPENIVVEMARENQFTKQGRRNSQQRLKGLTDSIKEFGSQILKEHPVENSQLQNDRLFLYYLQNGRDMYTGEELDIDYLSQYDIDHIIPQAFIKDNSIDNRVLTSSKENRGKSDDVPSKDVVRKMKSYWSKLLSAKLITQRKFDNLTKAERGGLTDDDKAGFIKRQLVETRQITKHVARILDERFYTETDENNKKIRQVKIVTLKSNLVSNFRKEFELYKVREINDYHHAHDAYLNAVIGKALLGVYPQLEPEFVYGDYPHFHGHKENKATAKKFFYSNIMNFFKKDDVRTDKNGEIIWKKDEYISNIKKVLSYPQVNIVKKVEEQTGGFSKESILPKGNSDKLIPRKTKKFYWDTKKYGGFDSPIVAYSILVIADIEKGKSKKLKTVKALVGVTIMEKMTFERDPIAFLERKGYRNVQEENIIKLPKYSLFKLENGRKRLLASARELQKGNEIVLPNHLGTLLYHAKNIHKVDEPKHLDYVDKHKDEFKELLDVVSNFSKKYTLAEGNLEKIKELYAQNNGEDLKELASSFINLLTFTAIGAPAAFKFFDKNIDRKRYTSTTEILNATLIHQSITGLYETRIDLSKLGGD

SEQ ID NO: 739 - protein, 1345 aa, Streptococcus mutans; identical to SEQ ID NO: 738

SEQ ID NO: 740 - protein, 1345 aa, Streptococcus mutans
MKKPYSIGLDIGTNSVGWAVVTDDYKVPAKKMKVLGNTDKSHIKKNLLGALLFDSGNTAEDRRLKRTTRRRYTRRRNRILYLQEIFSEEMGKVDDSFFHRLEDSFLVTEDKRGERHPIFGNLEEEVKYHENFPTIYHLRQYLADNPEKTDLRLVYLALAHIIKFRGHFLIEGKFDTRNNDVQRLFQEFLAVYDNTFENSSLQEQNVQVEEILTDKISKSAKKDRVLKLFPNEKSNGCFAEFLKLIVGNQADFKKHFELEEKAPLQFSKDTYEEELEVLLAQIGDNYAELFLSAKKLYDSILLSGILTVTDVSTKAPLSASMIQRYNEHQMDLTQLKQFIRQKLSDKYNEVFSDVSKDGYAGYIDGKTNQEAFYKYLKGLLNKIEGSGYFLDKIEREDFLRKQRTFDNGSIPHQIHLQEMRAIIRRQAEFYPFLADNQDRIEKLLTFRIPYYVGPLASGKSDFAWLSRKSADKITPWNFDEIVDKESSAEAFINRMTNYDLYLPNQKVLPKHSLLYEKFTVYNELTKVKYKTEQGKTAFFDANMKQEIFDGVFKVYRKVTKDKLMDFLEKEFDEFRIVDLTGLDKENKVFNASYGTYHDLCKILDKDFLDNSKNEKILEDIVLTLTLFEDREMIRKRLENYSDLLTKEQVKKLERRHYTGWGRLSAELIHGIRNKESRKTILDYLIDDGNSNRNFMQLINDDALSFKEEIAKAQVIGETDNLNQVVSDIAGSPAIKKGILQSLKIVDELVKIMGHQPENIVVEMARENQFTNQGRRNSQQRLKGLTDSIKEFGSQILKEHPVENSQLQNDRLFLYYLQNGRDMYTGEELDIDYLSQYDIDHIIPQAFIKDNSIDNRVLTSSKENRGKSDDVPSKDVVRKMKSYWSKLLSAKLITQRKFDNLTKAERGGLTDDDKAGFIKRQLVETRQITKHVARILDERFNTETDENNKKIRQVKIVTLKSNLVSNFRKEFELYKVREINDYHHAHDAYLNAVIGKALLGVYPQLEPEFVYGDYPHFHGHKENKATAKKFFYSNIMNFFKKDDVRTDKNGEIIWKKDEHISNIKKVLSYPQVNIVKKVEEQTGGFSKESILPKGNSDKLIPRKTKKFYWDTKKYGGFDSPIVAYSILVIADIEKGKSKKLKTVKALVGVTIMEKMTFERDPVAFLERKGYRNVQEENIIKLPKYSLFKLENGRKRLLASARELQKGNEIVLPNHLGTLLYHAKNIHKVDEPKHLDYVDKHKDEFKELLDVVSNFSKKYTLAEGNLEKIKELYAQNNGEDLKELASSFINLLTFTAIGAPATFKFFDKNIDRKRYTSTTEILNATLIHQSITGLYETRIDLSKLGGD

SEQ ID NO: 741 - protein, 1345 aa, Streptococcus mutans; identical to SEQ ID NO: 740

SEQ ID NO: 742 - protein, 1350 aa, Streptococcus mutans
MKKPYSIGLDIGTNSVGWAVVTDDYKVPAKKMTVLGNTDKSHIKKNLLGALLFDSGNTAADRRLKRTARRRYTRRRNRILYLQEIFAEEMSKVDDSFFHRLEDSFLVTEDKRGERHPIFGNLEEEVKYHENFPTIYHLRQYLADNPEKVDLRLVYLALAHIIKFRGHFLIEGKFDTRNNDVQRLFQEFLAVYDNTFENSSLQEQNVQVEEILTDKISKSAKKDRVLKLFPNEKSNGRFAEFLKLIVGNQADFKKHFELEEKTPLQFSKDTYEEELEVLLAQIGDNYAELFLSAKKLYDSILLSGILTVTDVSTKAPLSASMIQRYNEHQMDLAQLKQFIRQKLSDKYNEVFSDVSKDGYAGYIDGKTNQEAFYKYLKGLLNKIEGSGYFLDKIEREDFLRKQRTFDNGSIPHQIHLQEMRAIIRRQAEFYPFLADNQDRIEKILTFRIPYYVGPLARGKSDFAWLSRKSADKITPWNFDEIVDKESSAEAFINRMTNYDLYLPNQKVLPKHSLLYEKFTVYNELTKVKYKTEQGKTAFFDANMKQEIFDGVFKVYRKVTKDKLMDFLEKEFDEFRIVDLTGLDKENKAFNASYGTYHDLRKILDKDFLDNSKNEKILEDIVLTLTLFEDREMIRKRLENYSDLLTKEQVKKLERRHYTGWGRLSAELIHGIRNKESRKTILDYLIDDGNSNRNFMQLINDDALSFKEEIAKAQVIGETDNLNQVVSDIAGSPAIKKGILQSLKIVDELVKIMGHQPENIVVEMARENQFTNQGRRNSQQRLKGLTDSIKEFGSQILKEHPVENSQLQNDRLFLYYLQNGRDMYTGEELDIDYLSQYDIDHIIPQAFIKDNSIDNRVLTSSKENRGKSDDVPSEDVVNRMRPFWNKLLSSGLISQRKYNNLTKKELTPDDKAGFIKRQLVETRQITKHVARMLDERFNKEFDDNNKRIRRVKIVTLKSNLVSSFRKEFELYKVREINDYHHAHDAYLNAVVVKALLVKYPKLEPEFVYGEYPKYNSYRERKTATQKMFFYSNIMNMFKSKVKLADDQIVERPMIEVNDETGEIAWDKTKHITTVKKVLSYPQVNIVKKVEEQTIGQNGGLFDDNPKSPLEVIPSKLVPLKKALNPEKYGGYQKPTTAYPILLIVDTKQLIPISVMDKKRFEQNPVKFLKDKGYQQIEKNNFVKLPKYTLVDIGNGIKRLWASSKEVHKGNQLVVSKKSQDLLYHAHHLDNDYSNEYVKNHYQQFDILFNEITSFSKKCKLGKEHIQKIEEAYSKERDSASIEELADGFIKLLGFTQLGATSPFSFLGIKLNQKQYTGKKDYLLPCMEATLIHQSITGLYETRIDLSKLGGD

SEQ ID NO: 743 - protein, 1350 aa, Streptococcus mutans; identical to SEQ ID NO: 742

SEQ ID NO: 744 - protein, 1345 aa, Streptococcus mutans
MKKPYSIGLDIGTNSVGWAVVTDDYKVPDKKMKVLGNTDKSHIKKNLLGALLFDSGNTAEDRRLKRTARRRYTRRRNRILYLQEIFSEEMGKVDDSFFHRLEDSFLVTEDKRGERHPIFGNLEEEVKYHENFPTIYHLRQYLADNPEKTDLRLVYLALAHIIKFRGHFLIEGKFDTRNNDVQRLFQEFLAVYDNTFENSSLQEQNVQVEEILTDKISKSAKKDRVLKLFPNEKSNGRFAEFLKLIVGNQADFKKHFELEEKAPLQFSKDIYEEELEVLLAQIGDNYAELFLSAKKLYDSILLSGILTVTDVSTKAPLSASMIQRYNEHQMDLAQLKQFIRQKLSDKYNEVFSDVSKDGYAGYIDGKTNQEAFYKYLKGLLNKIEGSGYFLDKIEREDFLRKQRTFDNGSIPHQIHLQEMRAIIRRQAEFYPFLADNQDRIEKILTFRIPYYVGPLARGKSDFAWLSRKSADKITPWNFDEIVDKESSVEAFINRMTNYDLYLPNQKVLPKHSLLYEKFTVYNELTKVKYKTEQGKTAFFDANMKQEIFDGVFKVYRKVTKDKLMDFLEKEFDEFRIVDLTGLDKENKAFNASYGTYHDLRKILDKDFLDNSKNEKILEDIVLTLTLFEDREMIRKRLKNYSDLLTKEQLKKLERRHYTGWGRLSAELIHGIRNKESRKTILDYLIDDGNSNRNFMQLINDDALSFKEEIAKAQVIGETDNLNQVVSDIAGSPAIKKGILQSLKIVDELVKIMGHQPENIVVEMARENQFTNQGRRNSQQRLKGLTDSIKEFGSQILKEHPVENSQLQNDRLFLYYLQNGRDMYTGEELDIDYLSQYDIDHIIPQAFIKDNSIDNRVLTSSKENRGKSDDVPSKDVVRKMKSYWSKLLSAKLITQRKFDNLTKAERGGLTDDDKAGFIKRQLVETRQITKHVARILDERFYTETDENNKKIRQVKIVTLKSNLVSNFRKEFELYKVREINDYHHAHDAYLNAVIGKALLGVYPQLEPEFVYGDYPHFHGHKENKATAKKFFYSNIMNFFKKDDVRTDKNGEIIWKKDEHISNIKKVLSYPQVNIVKKVEEQTGGFSKESILPKGNSDKLIPRKTKKFYWDTKKYGGFDSPIVAYSILVIADIEKGKSKKLKTVKALVGVTIMEKMTFERDPVAFLERKGYRNVQEENIIKLPKYSLFKLENGRKRLLASARELQKGNEIVLPNHLGTLLYHAKNIHKVDEPKHLDYVDKHKDEFKELLDVVSNFSKKYTLAEGNLEKIKELYAQNNGEDLKELASSFINLLTFTAIGAPATFKFFDKNIDRKRYTSTTEILNATLIHQSITGLYETRIDLSKLGGD

SEQ ID NO: 745 - protein, 1345 aa, Streptococcus mutans
MKKPYSIGLDIGTNSVGWAVVTDDYKVSAKKMKVLGNTDKSHIKKNLLGALLFDSGNTAEDRRLKRTARRRYTRRRNRILYLQEIFAEEMSKVDDSFFHRLEDSFLVTEDKRGERHPIFGNLEEEVKYHENFPTIYHLRQYLADNPEKVDLRLVYLALAHIIKFRGHFLIEGKFDTRNNDVQRLFQEFLAVYDNTFENSSLQEQNVQVEEILTDKISKSAKKDRVLKLFPNEKSNGRFAEFLKLIVGNQADFKKHFELEEKAPLQFSKDTYEEELEVLLAQIGDNYAELFLSAKKLYDSILLSGILTVTDVSTKAPLSASMIQRYNEHQMDLAQLKQFIRQKLSDKYNEVFSDVSKDGYAGYIDGKTNQEAFYKYLKGLLNKIEGSGYFLDKIEREDFLRKQRTFDNGSIPHQIHLQEMRAIIRRQAEFYPFLADNQDRIEKILTFRIPYYVGPLARGKSDFAWLSRKSADKITPWNFDEIVDKESSAEAFINRMTNYDLYLPNQKVLPKHSLLYEKFTVYNELTKVKYKTEQGKTAFFDANMKQEIFDGVFKVYRKVTKDKLMDFLEKEFDEFRIVDLTGLDKENKAFNASYGTYHDLRKILDKDFLDNSKNEKILEDIVLTLTLFEDREMIRKRLENYSDLLTKEQVKKLERRHYTGWGRLSAELIHGIRNKESRKTILDYLIDDGNSNRNFMQLINDDALSFKEEIAKAQVIGETDNLNQVVSDIAGSPAIKKGILQSLKIVDELVKIMGHQPENIVVEMARENQFTNQGRRNSQQRLKGLTDSIKEFGSQILKEHPVEHSQLQNDRLFLYYLQNGRDMYTGEELDIDYLSQYDIDHIIPQAFIKDNSIDNRVLTSSKENRGKSDDVPSKNVVRKMKSYWSKLLSAKLITQRKFDNLTKAERGGLTDDDKAGFIKRQLVETRQITKHVARILDERFHTETDENNKKIRQVKIVTLKSNLVSNFRKEFELYKVREINDYHHTHDAYLNAVIGKALLGVYPQLEPEFVYGDYPHFHGHKENKATAKKFFYSNIMNFFKKDDVRTDKNGEIIWKKDEHISNIKKVLSYPQVNIVKKVEEQTGGFSKESILPKGNSDKLIPRKTKKFYWDTKKYGGFDSPIVAYSILVIADIEKGKSKKLKTVKALVGVTIMEKMTFERDPVAFLERKGYRNVQEENIIKLPKYSLFKLENGRKRLLASARELQKGNEIVLPNHLGTLLYHAKNIHKVDEPKHLDYVDKHKDEFKELLDVVSNFSKKYTLAEGNLEKIKELYAQNNGEDLKELASSFINLLTFTAIGAPATFKFFDKNIDRKRYTSTTEILNATLIHQSITGLYETRIDLSKLGGD

SEQ ID NO: 746 - protein, 1345 aa, Streptococcus mutans; identical to SEQ ID NO: 745

SEQ ID NO: 747 - protein, 1345 aa, Streptococcus mutans
MKKPYSIGLDIGTNSVGWSVVTDDYKVPAKKMKVLGNTDKSHIEKNLLGALLFDSGNTAEDRRLKRTARRRYTRRRNRILYLQEIFSEEMGKVDDSFFHRLEDSFLVTEDKRGERHPIFGNLEEEVKYHENFPTIYHLRQYLADNPEKVDLRLVYLALAHIIKFRGHFLIEGKFDTRNNDVQRLFQEFLAVYDNTFENSSLQEQNVQVEEILTDKISKSAKKDRVLKLFPNEKSNGRFAEFLKLIVGNQADFKKHFELEEKAPLQFSKDTYEEELEVLLAQIGDNYAELFLSAKKLYDSILLSGILTVTDVGTKAPLSASMIQRYNEHQMDLAQLKQFIRQKLSDKYNEVFSDVSKDGYAGYIDGKTNQEAFYKYLKGLLNKIEGSGYFLDKIEREDFLRKQRTFDNGSIPHQIHLQEMRAIIRRQAEFYPFLADNQDRIEKLLTFRIPYYVGPLARGKSDFAWLSRKSADKITPWNFDEIVDKESSAEAFINRMTNYDLYLPNQKVLPKHSLLYEKFTVYNELTKVKYKTEQGKTAFFDANMKQEIFDGVFKVYRKVTKDKLMDFLEKEFDEFRIVDLTGLDKENKVFNASYGTYHDLCKILDKDFLDNSKNEKILEDIVLTLTLFEDREMIRKRLENYSDLLTKEQVKKLERRHYTGWGRLSAELIHGIRNKESRKTILDYLIDDGNSNRNFMQLINDDALSFKEEIAKAQVIGETDNLNQVVSDIAGSPAIKKGILQSLKIVDELVKIMGHQPENIVVEMARENQFTNQGRRNSQQRLKGLTDSIKEFGSQILKEHPVENSQLQNDRLFLYYLQNGRDMYTGEELDIDYLSQYDIDHIIPQAFIKDNSIDNRVLTSSKENRGKSDDVPSKDVVRKMKSYWSKLLSAKLITQRKFDNLTKAERGGLTDDDKAGFIKRQLVETRQITKHVARILDERFNTETDENNKKIRQVKIVTLKSNLVSNFRKEFELYKVREINDYHHAHDAYLNAVIGKALLGVYPQLEPEFVYGDYPHFHGHKENKATAKKFFYSNIMNFFKKDDVRIDKNGEIIWKKDEHISNIKKVLSYPQVNIVKKVEEQTGGFSKESILPKGNSDKLIPRKTKKFYWDTKKYGGFDSPIVAYSILVIADIEKGKSKKLKTVKALVGVTIMEKMTFERDPVAFLERKGYRNVQEENIIKLPKYSLFKLENGRKRLLASARELQKGNEIVLPNHLGTLLYHAKNIHKVDEPKHLDYVDKHKDEFKELLDVVSNFSKKYTLAEGNLEKIKELYAQNNGEDLKELASSFINLLTFTAIGAPATFKFFDKNIDRKRYTSTTEILNATLIHQSITGLYETRIDLSKLGGD

SEQ ID NO: 748 - protein, 1345 aa, Streptococcus mutans; identical to SEQ ID NO: 747

SEQ ID NO: 749 - protein, 1355 aa, Streptococcus mutans
MKKSYSIGLDIGTNSVGWAVVTDDYKVPAKKMKVLGNTDKSHIKKNLLGALLFDSGNTAEDRRLKRTARRRYTRRRNRILYLQEIFSEEMGKVDDSFFHRLDESFLTDDDKNFDSHPIFGNKAEEDAYHQKFPTIYHLRKHLADSTEKADLRLVYLALAHMIKFRGHFLIEGELNAENTDVQKLFADFVGVYDRTFDDSHLSEITVDASSILTEKISKSRRLEKLINNYPKEKKNTLFGNLIALSLGLQPNFKTNFKLSEDAKLQFSKDTYEEDLEELLGKIGDDYADLFTLAKNLYDAILLSGILTADDSSTKAPLSASMIKRYAEHHEDLEKLKEFIKANKPELYHDIFKDETKNGYAGYIENGVKQDEFYKYLKNTLSKIAGSDYFLDKIEREDFLRKQRTFDNGSIPHQIHLQEMHAILRRQGDYYPFLKENQDRIEKILTFRIPYYVGPLARKNSRFAWAEYHSDEAVMPWNFDQVIDKESSAQAFIEHMTNNDLYLPNEKVLPKHSPLYEKYTVYNELTKIKYVTEIGEAKFFDANLKQEIFDGLFKHERKVTKKKLRTFLDKNFDEFRIVDIQGLDKETETFNASYATYQDLLKVIKDKVFMDNPENAEILENIVLTLTLFEDREMIKQRLAKYADVFDKKVIDQLARRHYTGWGRLSAKLLNGIRDKQSCKTIMDYLIDDAQSNRNLMQLITDDNLTFKDDIVKAQYVDNSDDLHQVVQSLAGSPAIKKGILQSLKIVDELVKVMGKEPEQIVVEMARENQTTAKGRRNSQQRYKRLKEAIKSLDRDLNHKILKEHPTDNQALQNNRLFLYYLQNGRDMYTGESLDINRLSDYDIDHVIPQAFIKDNSIDNRVLTSSKANRGKSDDVPSEDVVNRMRPFWNKLLSSGLISQRKYNNLTKKELTPDDKAGFIKRQLVETRQITKHVARMLDERFNKEFDDNNKRIRRVKIVTLKSNLVSSFRKEFELYKVREINDYHHAHDAYLNAVVVKALLVKYPKLEPEFVYGEYPKYNSYRERKTATQKMFFYSNIMNMFKSKVKLADDQIVERPMIEVNDETGEIAWDKTKHITTVKKVLSYPQVNIVKKVEEQTIGQNGGLFDDNPKSPLEVIPSKLVPLKKALNPEKYGGYQKPTTAYPILLIVDTKQLIPISVMDKKRFEQNPVKFLKDKGYQQIEKNNFVKLPKYTLVDIGNGIKRLWASSKEVHKGNQLVVSKKSQDLLYHAHHLDNDYSNEYVKNHYQQFDILFNEITSFSKKCKLGKEHIQKIEEAYSKERDSASIEELADGFIKLLGFTQLGATSPFSFLGIKLNQKQYTGKKDYLLPCMEATLIHQSITGLYETRIDLNKLGGD

SEQ ID NO: 750 - protein, 1355 aa, Streptococcus mutans; identical to SEQ ID NO: 749

SEQ ID NO: 751 - protein, 1125 aa, Streptococcus mutans
MTNGKILGLDIGIASVGVGIINAKTGNVEHASSRIFPAANADNNVERRSARGGRRLIRRKKHRLKRVEDLFEKYNIDTDFSNLNLNPYQLRVKGLNEQLSNEELFAILKNIAKRRGISYLDDAEDDSVGSSDYAKAIDENRKLLKKQTPGEIQLKRLEKYGQLRGNFTIQDENGEYHRLINVFSTSDYVKEARRILETQSYYNKFITESFVEDYIKILQGKRKYYVGPGNEKSRTDYGIYRTDGETLDNLFGILIGKCGFYPEEYRAAKASYTAQEYNFLNDLNNLTVPTETKKLSTEQKYQLVDFAKTASTLEAAKLLKEIAKLVGCQVEEIKGYRLDNKDKPDLHTFEPFRKLKSNLTTIAVENLSITTLDTLAHILTLNTEREGIEEAIQKELPNIFSDEQITGIIAVRKKNSQIFGKGWHSFSIKLMKELIPELYETSEEQMTILIRLKKVKTNSKITNRTKYINEQEVTDEIYNPVVSKSIRQTVKIINAAIKKYGAFDQIVIEMPRESNEEDERKFIADLQKSNAKEKDDAMKQAALLYNGKAELPHGVFHGHKELATKIRLWYQQGERCLYSGKHIDIHDLIHNQHMFEIDHVLPLSLSFDDSLANKVLVYSWANQEKGQRTPFQALPQMASAWSFRELRDYISKQKGISKKKRDYLLTEQDINKVEVKQKFIERNLVDTRYVSRVVLNTLQDALKVMNKETKISVIRGQFTSQLRRQWRIDKSRETYHHHAVDALIIAASSQLRLWKKQNNPMFAEDKHGQKINLDTGEVLSDDAYKELVYQAPYQGFVNTISSKSFEDEILFSYQVDSKVNRKISDATIYATRQAQLGKDKKEETYVLGKIKDIYSQAGYDAFRKKYDKDKAVFLMYQKDPETWEKVIEVILRDYKELDDKGKEIGNPFERYKVKHGFVRKYSRKNKGTEIKSLKYYDNKLGNHIDITPNNSKHSVVLQSINPWRADLYFNPETTKYELMGLKYADLSFEKGTGKYSISREKYDEIKEREGISSKSEFKFTLYKNDLILVKDIGNHKELIARFNSKNDTSKHYVELKPWNKAKFDSEEELIPAFGKVAKSGQFIKGLNKPDLSIYKVKTDILGHKYYIKKEGDKPKLNFENKIKNK

SEQ ID NO: 752 - protein, 1125 aa, Streptococcus mutans
MTNGKILGLDIGIASVGVGIINAKTGNVEHASSRIFPAANADNNVERRSARGGRRLIRRKKHRLKRVEDLFEKYNIDTDFSNLNLNPYQLRVKGLNEQLSNEELFAILKNIAKRRGISYLDDAEDDSVGSSDYAKAIDENRKLLKKQTPGEIQLKRLEKYGQLRGNFTIQDENGEYHRLINVFSTSDYVKEARRILETQSYYNKFITESFVEDYIKILQGKRKYYVGPGNEKSRTDYGIYRTDGETLDNLFGILIGKCGFYPEEYRAAKASYTAQEYNFLNDLNNLTVPTETKKLSTEQKYQLVDFAKTASTLGAAKLLKEIAKLVGCQVEEIKGYRLDNKDKPDLHTFEPFRKLKSNLTTIAVENLSITTLDTLAHILTLNTEREGIEEAIQKELPNIFSDEQITEIIAVRKKNSQIFGKGWHSFSIKLMKELIPELYETSEEQMTILTRLKKVKTNSKITNRTKYINEEEITDEIYNPVVSKSIRQTVKIINATIKKYGAFDQIIIEMPRESNEEDERKFIADLQKSNAKEKDDAMKQAALLYNGKDELPHDVFHGHKELATKIRLWYQQGERCLYSGKHIDIHDLIHNQHMFEIDHVLPLSLSFDDSLANKVLVYSWANQEKGQRTPFQALPQMASAWSFRELRDYISKQKGISKKKRDYLLTEQDINKVEVKQKFIERNLVDTRYVSRVVLNTLQDALKVMNKETKISVIRGQFTSQLRRQWRIDKSRETYHHHAVDALIIAASSQLRLWKKQNNPMFAEDKHGQKINLDTGEVLSDDAYKELVYQAPYQGFVNTISSKSFEDEILFSYQVDSKVNRKISDATIYATRQAQLGKDKKEETYVLGKIKDIYSQAGYDAFRKKYDKDKAVFLMYQKDPETWEKVIEVILRDYKELDDKGKEIGNPFERYKVKHGFVRKYSRKNKGTEIKSLKYYDNKLGNHIDITPNNSKHSVVLQSINPWRADLYFNPETTKYELMGLKYADLSFEKGTGKYSISREKYDEIKEREGISSKSEFKFTLYKNDLILVKDIGNHKELIARFNSKNDTSKHYVELKPWNKAKFDSEEELIPAFGKVAKSGQFIKGLNKPDLSIYKVKTDILGHKYYIKKEGDKPKLNFENKIKNK

SEQ ID NO: 753 - protein, 1125 aa, Streptococcus mutans; identical to SEQ ID NO: 752

SEQ ID NO: 754 - protein, 1125 aa, Streptococcus mutans; identical to SEQ ID NO: 751

SEQ ID NO: 755 - protein, 670 aa, Streptococcus oralis
MAKFNKNYSIGLDIGVSSVGYAVVTEDYRVPAFKFKVLGNTEKEKIKKNLIGSTTFVPAQSAQGTRVFRVNRRRIDRRNHRIAYLRDIFQKEIGKIDKNFYRRLDESFRVLGDKSEDIQIKQPFFGNKELETAYHKKYPTIYHLRKHLADADKNSPVADIREVYMALSHIFKYRGHFLTLGKIDPNNINMQNSWIDFIESCQDAFDLEISDESKTIAAIFKSSDNRQEKVKGILSYFQPELAKKDKSIFKQLLQLLFGLKTKFKECFELEEEPDLNFSKENYDENLENLLGTLEEDFPDVFAKLKILRDTILLSDMLTYTGATHARFSATMVERYEEHRKDLQRFKSFVKQNLSEQDYLDIFGRKTPNGFDVDKETKGYVGYISNKMVLTNKQKTIQQNFYDYISGKITGIEGAEYFLNKISDGTFLRKLRTTDNGTIPNQIHAYELEKIIERQGRDYPFLLENKDKLLSILTFKIPYYVGPLAKGNNSRFAWIKRTTSQDVLDNNDEDTKNGKIRPWNYHKLINMDETRDAFITNLIGNDIILLNEKVLPKRSLIYEEVMLQNELTRIKYKDKYGKIHFFDSELRQEIINNLFKTNSKRVSSAMLLAYLENFTNLQAVEIVSGIEKGKSLNSTLKTYNDLKTIFSEDLLDSEIYQKELEEIIKVITVFV

SEQ ID NO: 756 - protein, 1373 aa, Streptococcus oralis
MENKNYSIGLDIGTNSVGWAVITDDYKVPSKKMKVLGNTDKRFIKKNLIGALLFDEGTTAEARRLKRTARRRYTRRKNRLRYLQEIFAEEMSKVDSSFFHRLDDSFLIPEDKKGSKYPIFATLIEEKEYHKQFPTIYHLRKQLADSKEKTDLRLIYLALAHMIKYRGHFLYEDTFDIKNNDIQKIFNEFISIYNNTFEGNSLSGQNVQVEAIFTDKISKSAKRERVLKLFPDEKSTGLFSEFLKLIVGNQADFKKHFDLEEKAPLQFSRDTYDEDLENLLGQIGDDFADLFVAAKKLYDAILLSGILTVTDPSTKAPLSASMIERYENHQKDLATLKQFIKTNLPEKYDEVFSDQSKDGYAGYIDGKTTQESFYKYIKNLLSKFEGADYFLEKIEREDFLRKQRTFDNGSIPHQIHLQEMNAILRRQGEHYPFLKENKEKIEKILTFRIPYYVGPLARGNRDFAWLTRNSDQAIRPWNFEEIVDKASSAESFINKMTNYDLYLPEEKVLPKHSLLYETFAVYNELTKVKFIAEGLRDYQFLDSRQKKDIFYTLFKAEDKRKVTEKDIIQYLHTVDGYDGIELKGIEKQFNASLSTYHDLLKIIKDKEFMDDPNNEEILENIVHTLTIFEDREMIKQRLAQYDSLFDEKVIKALTRRHYTGWGKLSSKLINGIRDKQTGKTILDYLMDDGYNNRNFMQLINDDELSFKEIIKKAQVVGKTDDVKQVVQELPGSPAIKKGILQSIKLVDELVKVMGHEPESIVIEMARENQTTARGKKNSQQRYKRIEDSLKILASGLNAKILKEHPTDNIQLQNDRLFLYYLQNGRDMYTGKPLDINQLSSYDIDHIVPQAFIKDDSLDNRVLTSLKDNRGKSDNVPSLEVVEKMKTFWQQLLDSKLISYRKFNNLTKAERGGLDERDKVGFIKRQLVETRQITKHVAQILDARYNTEVNEKDKKNRTVKIITLKSNLVSNFRKEFRLYKIREINDYHHAHDAYLNAVVAKAILKKYPKLEPEFVYGDYQKYDLKRYISRSKDPKEIEKATEKYFFYSNLLNFFKEEVHYADGTIVKRENIEYSKDTGEIAWNKEKDFATIKKVLSLPQVNIVKKREVQTGGFSKESILPKGNSDKLIPRKTKDILWDTTKYGGFDSPVIAYSILLIADIEKGKAKRLKTVKTLVGITIMEKATFEKSPIAFLENKGYHNVRKENILCLPKYSLFELKNGRRRMLASAKELQKGNEIVLPVHLTTLLYHAKNIHRLDEPEHLEYIQKHRNEFKGLLNLVSEFSQKYVLADANLEKIKNLYADNEQADIEILANSFINLLTFTALGAPAAFKFFGKDVDRKRYTTVSEILNATLIHQSITGLYETRIDLSKLGED

SEQ ID NO: 757 - protein, 1371 aa, Streptococcus oralis
MENKNYSIGLDIGTNSVGWSVITDDYKVPSKKMKVLGNTDKRFIKKNLIGALLFDEGTTAEARRLKRTARRRYTRRKNRLRYLQEIFAEEMSKVDSSFFHRLDDSFLIPEDKRGSKYPIFATLAEEKEYHKQFPTIYHLRKQLADSKEKTDLRLIYLALAHMIKYRGHFLYEDTFDIKNNDIQKIFSEFISIYDNTFEGSSLSGQNAQVEAIFTDKISKSAKRERVLKLFPDEKSTGLFSEFLKLIVGNQADFKKHFDLGEKAPLQFSKDTYDEDLENLLGQIGDDFADLFLVAKKLYDAILLSGILTVTDPSTKAPLSASMIERYENHQKDLAVLKQFIKNNLPEKYDEVFSDQSKDGYAGYIDGKTTQEAFYKYIKNLLSKFEGTDYFLEKIEREDFLRKQRTFDNGSIPHQIHLQEMNAILRRQGEHYPFLKDNKEKIEKILTFRIPYYVGPLARGNRDFAWLTRNSDEAIRPWNFEEIVDKASSAEDFINKMTNYDLYLPEEKVLPKHSLLYETFAVYNELTKVKFIAEGLRDYQFLDSGQKKQIVTQLFKEKRKVTEKDIIQFLHNVDGYDGIELKGIEKQFNASLSTYHDLLKIIKDKEFMDDSKNEEILENIVHTLTIFEDREMIKQRLAQYDSLFDEKVIKALIRRHYTGWGKLSAKLIDGICDKQTGNTILDYLIDDGKNNRNFMQLINDDGLSFKEITQKAQVVGKTDDVKQVVQELPGSPAIKKGILQSIKIVDELVKVMGHTPESIVIEMARENQTTARGKKNSQQRYKRIEDALKNLASGLDSNILKEHPTNNIQLQNDRLFLYYLQNGRDMYTGKPLDINQLSSYDIDHIVPQAFIKDDSLDNRVLTSLKDNRGKSDNVPSIEVVQKRKAFWQQLLDSKLISERKFNNLTKAERGGLDERDKVGFIKRQLVETRQITKHVAQILDARFNKEVNEKDKKNRTVKIITLKSNLVSNFRKEFRLYKVREINDYHHAHDAYLNAVVAKAILKKYPKLEPEFVYGDYQKYDLKRYISRSRNPKEVEKATEKYFFYSNLLNFFKEEVHYADGTIVKRENIEYSKDTGEIAWNKEKDFATIKKVLSYPQVNIVKKREVQTGGFSKESILPKGNSDKLIPRKTKDILWETTKYGGFDSPVIAYSILLIADIEKGKAKKLKTVKTLVGITIMEKAAFEENPITFLENKGYHNVRKENILCLPKYSLFELENGRRRLLASAKELQKGNEIVLPVYLTTLLYHSKNVHKLDEPEHLEYIQKHRNEFKDLLNLVSEFSQKYVLADANLEKIQNLYADNEQADIEILANSFINLLTFTALGAPAAFKFFGKDIDRKRYTTVSEILNATLIHQSITGLYETRIDLSKLGED

SEQ ID NO: 758 - protein, 1121 aa, Streptococcus oralis
MNGLVLGLDIGIASVGVGILEKNSGKIIHANSRLFPAATADNNVERRKNRQARRLNRRKKHRGVRFQDLFEDYGLLTDFSKVSINLNPYRLRVDGLNQQLTNEELFIALKNIVKRRGISYLDDASEDGGAVSSDYGKAVEENRKLLAEQTPGQIQLERFEKYGQVRGDFTVVENGEKCRLINVFSTSAYRKEAEKILRKQQEFNNQITDEFIEDYLKILTGKRKYYHGPGNEKSRTDYGRFRTDGTTLDNIFGVLIGKCTFYPNEYRASKSSYTAQEFNLLNDLNNLTVPTETKKLSEEQKKVIVEYAKEAKTLGASTLLKYIVKMIDASVDQISGYRVDVNNKPEMHTFEVYRKMQSLETISVGELSRNVLDELAHILTLNTEREGIEEAINSKLMGVFSQDQVLELVQFRKNNSSLFSKGWHNFSLKLMMELIPELYETSEEQMTILTRLGKQKSKETSKRTKYIDEKELTEEIYNPVVAKSVRQAIKIINEATKKHGIFDNIVIEMARENNEEDAKKDYIKRQKANQDEKNAAMEKAAFQYNGKKELPGNIFNGHKELATKIRLWHQQGEKCLYTGKTIPISDLIHNQYKYEIDHILPLSLSFDDSLSNKVLVHATANQEKGQRTPFQALDSMDDAWSYREFKSYVKDLKSLSNKKKDYLLTEEDISKIEVKQKFIERNLVDTRYSSRVVLNALQDFYKSHQFDTTISVVRGQFTSQLRRKWGLEKSRETYHHHAVDALIIAASSQLRLWKKQNNPLITYKEGQFVDSQTGEIISLTDDEYKELVFKAPYDHFVDTLHSKTFEDGILFSYQVDSKYNRKISDATIYATRKAKLDKDKSEETYVLGKIKDIYSQAGYDAFIKIYNKDKRKFLMYHKDPQTFEKVIEEILRTYPSKERNDKNKEVPCNPFEKYRQENGPIRKYSKKGNGPEIKCLKYYDNKLGNYIDISPDGSDNQVVLQSLKPWRTDVYFNHQTKEYELMGLKYSDLSFEKGSGKYSISNEKYNSIKRIEGVNEQSEFKFTLYKNDLILIKDSENNEQKLFRFNSRNDTAKHYVELKPYDKARFDGQQELITILGNVAKGGQCLKGLNKSNISIFKVKTDVLGKKHIIKKEGDEPKLKF

SEQ ID NO: 759 - protein, 1134 aa, Streptococcus oralis
MNGLVLGLDIGIASVGVGILEKNSGKIVHASSRIFPAATADNNVERRKNRQARRLHRRKKHRGARLKDLFEYYGLLTDFSKVSINLNPYRLRVDGLDQQLTNEELFIALKNIVKRRGISYLDDASEDGGTVSSDYGKAVEENRKLLAEQTPGQIQLERFEKYGQLRGDFTVVENSEKCRLINVFSTSAYKKEAERILRKQQEFNNQITDEFIEDYLKILTGKRKYYHGPGNEKSRTDYGRFRTDGATLDNIFGILIGKCTFYPNEYRASKASYTAQEFNLLNDLNNLTVPTETKKLSEEQKKTIIEYAKSAKTLGASTLLKYIAKMIDASVDQIRGYRVDVNNKPEMHTFEVYRKMQSLETISVGELSRNILDELAHILTLNTEREGIEEAINTKLRDSFSQDQVLELVQFRKNNSSLFSKGWHNFSLKLMMELIPELYETSEEQMTILTRLGKQKSKETSKRTKYIDEKEVTEEIYNPVVAKSVRQAIKIINEATKKHGIFDNIVIEMARENNEEDAKKDYIKRQKANQDEKYAAMEKAAFQYNGKKELPDNIFHGHKELATKIRLWHQQGEKCLYTGKSIPISDLIHNQYKYEIDHILPLSLSFDDSLSNKVLVLATANQEKGQRTPFQALDSMDDAWSYREFKSYVKESKLLGNKKKEYLLTEEDISKIEVKQKFIERNLVDTRYSSRVVLNALQDFYKNHNFDTTISVVRGQFTSQLRRKWGLEKSRETYHHHAVDALIIAASSQLRLWKKQNNPLIAYKEGQFVDSQTGEIISLTDDEYKELVFKAPYDHFVDTLSSKTFEDSILFSYQVDSKFNRKISDATIYATRKAKLDKEKKEYTYTLGKIKDIYSLGTKTPSKTGFYKFLDLYNKDKSQFLMFQKDRKTWDEVIEKIMEQYRPFKEYDKAGKLVDFNPFEKYRQENGPIRKYSKKGNGPEIKSLKYYDILLGKHKNITPEGSRNTVALLSLNPWRTDVYYNMETKKYEFLGLKYADLPFEEGGAYGISTETYNELREKEGIGKNSEFKFTLYKNDLILIKDTETNCQQFFRFWSRTGKDNPKSFEKHKIELKPYEKAKFEKGEELEVLGKVPPSSNQFQKNMQIENLSIYKVKTDVLGNKHFIKKEGDKPKLKF

SEQ ID NO: 760 - protein, 550 aa, Streptococcus oralis
MYSLDKNGSPTPLYRDQLNQYEVDHIIPYSFLPIDSIDNKVLTHRENNQRKLDNIPDKETVANMKPFWEKLYNAKLISQTKYQRLTTSERTPDGVLTESMKAGFIERQLVETRQIIKHVARILDNRFSDTKIITLKSQLVTNFRNTFHIAKIRELNDYHHAHDAYLAVVVGQTLLKAYPKLAPELIYGHHAHFNRHEENKATIRKYLYSNIMRFFNNPDSKVSKDIWDCNRDLPIIKDIIYNSQVNFVKRTMIKKGAFYNQNPVGKFNKQIAANNRYPLKTKVSSLDTSIYGGYGPMNSALSIIIIAERFNEKKCKIETVKEFHDIFIIDYKKFNNDPFQFLNDTSENGFLKKNNINRVLAFYRVPKYSLMQKIDGTRMLFESKSNLHKATQFKLTKTQNELFFHMRRLLTKSNLMDLKSESAIKESQNFILKHKEEFDNISNQLSAFSQKMLGDTTSLKNLIKGYNERKIKEINSSEETIKYFYDNFIKMFSFVKSGAPKDINDFFNNKYTVARMRPKPDKKLLNATLIHQSITGLYETRIDLSKLGED

SEQ ID NO: 761 - protein, 1140 aa, Streptococcus parasanguinis
MNGLVLGLDIGIASVGVGILKKDIGEIIHTNSRLFSAATADSNIERRGHRGGKRLTRRKKHRSIRLHDLFEDFGLLTDFSKVSINLNPYQLRVQGLDNQLTNEELFIALKNIVKRRGISYLDDASEDGGTVSSDYGKAVEENRKLLAEQTPGQIQLDRFEKYGQVRGDFNVVENGEKRRLINVFTTSAYSKEAERILRKQQEFNKKITDEFIEDYLTILTGKRKYYHGPGNEKSRTDYGRYTTKKDPEGKYITLDNIFGILIGKCTFYPDEYRASKASYTAQEFNLLNDLNNLTVPTETKKLSEEQKKTIIKYAKTAKTLGASTLLKYIAKLIGASVDQIHGYRIDPNKKPEMHTFETYRKMQSLETISVEELPRKVLDELAHILTLNTEREGIEEAINATLKDTFSQDQVLELVQFRKNNSSLFSKGWHSFSLKLMMELIPELYETSEEQMTILTRLGKQKSKETSKRTKYIDEKELTEEIYNPVVAKSVRQAIKIINEATKKYGIFDNIVIEMARENNEEDAKKEYIKRQKANLDEKNAAMEKAAFQYNGKKELPDNVFHGHKELATKIRLWHQQGEKCLYTGKNIPISDLIQNQYKYEIDHILPLSLSFDDSLSNKVLVLATANQEKGQRTPFQALDSMDDAWSYREFKSYVKDSKLLGNKKKEYLLTEEDISKIEVKQKFIERNLVDTRYSSRVVLNALQDFYKEHQFDTTISVVRGQFTSQLRRKWGLEKSRETYHHHAVDALIIAASSQLRLWKKQNNPLISYTEGQFVDQVTGEIISLSDDEYKELVFKAPYDHFVDTLKSKKFEDSILFSYQVDSKYNRKISDATIYATRKAKLDKENKEYTYTLGKIKDIYALGTKSPSKTGFYKFLDLYNKDKSQFLMFQKDRKTWDEVIEKIIEQYRPFKEYDENGKEVDFNPFEKYRIENGPIRKYSKKGNGPEIKSLKYYDNLLGKFVDITPSESKNPVALLSLNPWRTDVYYNTETSKYEFLGLKYADLCFEKGGAYGISEVKYNKIREKEGIGKESEFKFTLYKNDLILIKDTETNCQQIFRFWSRTGKDNPKSFEKHKIELKPYEKARFEKGEELEVLGKVPPSSNQLQKNMQIENLSIYKVKTDVLGNKHFIKKEGEEPKLKF

SEQ ID NO: 762 - protein, 1374 aa, Streptococcus pseudoporcinus
MKKRYSYSIGLDIGTNSVGWAVINEDYKVPAKKMTVFGNTDRKTIKKNLLGTVLFDSGETAQARRLKRTNRRRYTRRRYRLCQLQNIFATEMVKVDDTFFQRLSESFFYYQDKAFDKHPIFGNSKEERAYHKTYPTIYHLRKDLADRDQKADLRLIYLALSHIIKFRGHFLIEGKLNSENTDVQKLFIALVTVYNLLFEEEPIAGETCDAKALLTAKTSKSKRLESLISEFPGQKKNGLFGNLLALALGLRPNFKSNFGLSEDAKLQITKDTYEEELDNLLAEIGDHYADLFLAAKNLSDAILLSDILTLSDENTRAPLSASMIKRYEEHQEDLALLKKLVKEQMPEKYWEIFSNAKKNGYAGYIEGKVSQEDFYRYIKPILSRLKGGDEFLAKIDRDDFLRKQRTFDNGSIPHQIHLKELHAILRRQEKYYPFLAEQKEKIEQLLCFRIPYYVGPLAKGGNSSFAWLKRRSDEPITPWNFKDVVDEEASAQAFIEGMTNYDTYLPEEKVLPKHSPLYEMFTVYNELTKVKYIAENMTKPLYLSAEQKEAIIDHLFKQTRKVTVKDLKEKYFSQIEGLENVDVTGVEGAFNASLGTYNDLLKIIKDKAFLDDEANAEILEEIVLILTLFQDEKLIEKRLAKYANLFEKSVLKKLRKRHYRGWGRLSRQLIDGMKDKASGKTILDFLKADDFANRNFIQLINDSSLDFEKLIDDAQKKAIKRESLTEAVANLAGSPAIKKGILQSLKVVDEIVKVMGHNPDNIVIEMSRENQTTAQGLKNARQRLKKIKEVHKKTGSRILEDNSERITNLTLQDNRLYLYLLQDGKDMYTGQDLDINNLSQYDIDHIIPQSFIKDNSIDNLVLTTQKANRGKSDNVPSIEVVRDMKDRVWRRQLANGAISRQKFDHLTKAERGGLADSDKARFLRRQLVETRQITKHVAQLLDSRFNSKSNQNKKLARNVKIITLKSKIVSDFRKDFGLYKLREVNNYHHAHDAYLNAVVGTALLKKYPKLEAEFVYGDYKHFDLVKLISKSDPSLGKATAKVFFYSNIMNFFKEELSLADGTLMKRPVIETNTETGEVVWDKVKDFKTIRKVLSYPQVNIVKKTEIQSGAFSKESVLSKGNSDKLIERKKGWDPKKYGGFDSPNTAYSIFVVAKVAKRKAQKLKTVKEIVGITIMEQAEYEKDNIAFLEKKGYQDIQEKLLIKLPKYSLFELENGRRRLLASANEFQKGNELALSGKYMKFLYLASRYDKLSSKIESEQQKKLFVEQHLHYFDEILDIVVKHATCYIKAENNLKKIISLYKKKEAYSINEQALNMLNLFIFTSLGAPSTFVFFDETIDRKRYTTSSDVLNGILIQQSITGLYETRIDLSRFGGD

SEQ ID NO: 763 - protein, 1052 aa, Streptococcus pyogenes
LSASMIKRYDEHHQDLTLLKALVRQQLPEKYKEIFFDQSKNGYAGYIDGGASQEEFYKFIKPILEKMDGTEELLAKLNREDLLRKQRTFDNGSIPHQIHLGELHAILRRQEDFYPFLKDNREKIEKILTFRIPYYVGPLARGNSRFAWMTRKSEETITPWNFEEVVDKGASAQSFIERMTNFDKNLPNEKVLPKHSLLYEYFTVYNELTKVKYVTEGMRKPAFLSGEQKKAIVDLLFKTNRKVTVKQLKEDYFKKIECFDSVEISGVEDRFNASLGTYHDLLKIIKDKDFLDNEENEDILEDIVLTLTLFEDREMIEERLKTYAHLFDDKVMKQLKRRRYTGWGRLSRKLINGIRDKQSGKTILDFLKSDGFANRNFMQLIHDDSLTFKEDLQKAQVSGQGDSLHEHIANLAGSPAIKKGILQTVKVVDELVKVMGRHKPENIVIEMARENQTTQKGQKNSRERMKRIEEGIKELGSDILKEYPVENTQLQNEKLYLYYLQNGRDMYVDQELDINRLSDYDVDHIVPQSFLKDDSIDNKVLTRSDKNRGKSDNVPSEEVVKKMKNYWKQLLNAKLITQRKFDNLTKAERGGLSELDKAGFIKRQLVETRQITKHVAQILDSRMNTKYDENDKLIREVRVITLKSKLVSDFRKDFQFYKVREINNYHHAHDAYLNAVVGTALIKKYPKLESEFVYGDYKVYDIRKMIAKSEQEIGKATAKYFFYSNIMNFFKTEITLANGEIRKRPLIETNGETGEIVWDKGRDFATVRKVLSMPQVNIVKKTEVQTGGFSKESILPKRNSDKLIARKKDWDPKKYGGFDSPTVAYSVLVVAKVEKGKSKKLKSVKELVGITIMERSSFEKDPVDFLEAKGYKEVRKDLIIKLPKYSLFELENGRKRMLASAGELQKGNELALPSKYVNFLYLASHYEKLKGSPEDNEQKQLFVEQHKHYLDEIIEQISEFSKRVILADANLDKVLSAYNKHRDKPIREQAENIIHLFTLTNLGAPAAFKCFDTTIGRNRYKSIKEVLDATLIHQSITGLYETRIDLSQLGGD

SEQ ID NO: 764 - protein, 1368 aa, Streptococcus pyogenes; identical to SEQ ID NO: 52

SEQ ID NO: 765 - protein, 1367 aa, Streptococcus pyogenes; identical to SEQ ID NO: 256

SEQ ID NO: 766 - protein, 1368 aa, Streptococcus pyogenes [sequence omitted]

SEQ ID NO: 767 - protein, 1370 aa, Streptococcus ratti
MKKPYSIGLDIGTNSVGWAVITDDYKVPAKKMKVLGNTDKNYIKKNLLGALLFDSGNTAEDRRLKRTARRRYTRRRNRLLYLQDIFSDEMNKVDESFFHRLEDSFLVSEDKRGDHHPIFGNVVDEVKYHEQFPTIYHLRKYLADTPEKADLRLVYLALAHMIKFRGHFLIDDPKLDVKNTDSQELFSQFLTAYDVTQEDSHLADVKINISDIITEKMNKSRKVEALLFHFPSQKKNSFFGNLVSLVFGLLPNFKTNFNLAEDAKLQLSKDSYDEDLENLLGQIGDEYTDVFVAARKLYDSILLSGILTVNDLSTKAILSASMVRRYEEHNKDLAKLKAFVKANFTHDVFKEVFSDASKNGYAGYIEGKTSQEDFYKYVKNLIGKVDGSADFIEKIDREDFLRKQRTFDNGSIPHQVHLAEMKAILRRQGEYYPFLKEHAEKIQQILTFRIPYYVGPLDRHGHSDFAWASFNSEEKVTPWNFEEIIDKNKSAQAFIERMTNQDLYLPNEKVLPKHSPLYEKYTVYNELTKIKYVTETGTAKFFDANLKQEIFDGLFKKERKVTKRKLLTFLEKNFDEFRIVDIQGLDKETETFNASYGIYQDLLKIIKDKAFMDDSENADILEDIVLTLTLFEDREMIKQRLAKYADLFDKKVIDNLARRRYTGWGRLSAKLLNGIRDKRSRKTIMDYLVDDGRSNRNLMQLITDDNLTFKDEIAKAQYSDNSDDLHQVVQDLAGSPAIKKGILQSVKIVDELVKVMGYEPEQIVVEMARENQTTAKGRRNSQQRYKRLEEAIKNLDRDLNYKILKEHPTDNQALQNDRLFLYYLQNGRDMYTGESLDINRLSDYDIDHIIPQAFIKDNSIDNRVLVSSAKNRGKSDDVPSEDVVNRMRPFWNKLLNCGLISQRKYSNLTKKELTPNDKAGFIKRQLVETRQITKHVARILDEHFNKEFDEDKKRIRKVKVVTLKSNLVSNFRKEFELYKVREINDYHHAHDAYLNAVVAKALLMKYPKLEPEFVYGEYPKYNSYRERKTATQRMFFYSNIMNMFKSKVKLADERIIERPMIEVNDETGEIAWDKTKHIATVKKVLSYPQINIVKKVEEQTGGLTNETIYPRGSFDKLLNRKNTLEASKYGGFGSPTVAYCVLVVADSKNENGKVKKLKLGSELLGITILEKNDFENNSLDFLSRKGYQGVQEKKIIKLPKYSLFEFQDGSRRMLSSVMANDNKRGDLQKANEMILPAYLVKLLYHAKHINSVGEPAHKNYINEHCSEFQDLLNYIRQFADKFVDVDKNLSKIRSLSKSMAEYSVSEICSSFVNLLTLTALGAPADFKFFGTTIPRKRYGSPQSILSATLIHQSITGLYETRIDLSKLGED

SEQ ID NO: 768 - protein, 1135 aa, Streptococcus salivarius
MSDLVLGLDIGIGSVGVGILNKVTGEIIHKNSRIFPAAQAENNLERRTNRQGRRLTRRKKHRRVRLNHLFEESGLITDFTKVSINLNPYQLRVKGLTAELSNEELFIALKNMVKHRGISYLDDASDDGNSSVGDYAQIVKENSKQLETKTPGQIQLERYQKYGQLRGDFTVEEDGRKHRLINVFPTSAYHAEALRILQTQQEFNPQITDEFINSYLEILTGKRKYYHGPGNEKSRTDYGKYTTKKDAQGQYITLNNIFGILIGKCTFYPEEYRAAKASYTAQEFNLLNDLNNLTVPTETKKLSEEQKYQIITYVKNEKAMGPAKLFKYIAKLLACDIADIKGYRIDKSDKAEIHTFEAYRKMKTLETIDIEQIEREKLDKLAYVLTLNTEREGIQEALDHEFADGTFSQEQVDELVQFRKANSSIFGKGWHSFSVKLMMELIPELYATSEEQMTILTRLGKQKTTSSSNKTKYIDEKQLTEEIYNPVVAKSVRQAIKIVNAAIKKYGDFDNIVIEMARETNEDDEKKAIQKIQKANKAEKDAAMRKAANQYNGKAELPHSVFHGHKQLATKIRLWHQQGERCLYTGKTISIHDLINNPNQFEIDHILPLSITFDDSLANKVLVYATANQEKGQRTPYQALDSMDDAWSFRELKAFVRESKALSNKKKEYLLTEEDISKFDVRKKFIERNLVDTRYASRVVLNALQEHFKAHKIDTKVSVVRGQFTSQLRRHWGIDKTRDTYHHHAVDALIIAASSQLNLWKKQKNTLVSYSEDQLLDIETGELISDDEYKESVFKAPYQHFVDTLKSKEFEDSILFSYQVDSKFNRKISDATIYATRQAKVGKDKKDETYVLGKIKDIYALGTKTPSKTGFYKFLDLYNKDKSQFLVYQKDRKTWDEVIEKIMEQYRPFKESDKNGKEVDFNPFEKYRIENGPIRKYSRKGNGPEIKSLKYYASKLGNHIDITPKDSNNKVVLQSVSPWRADVYFNKTTGSYEILGLKYADLQFEKGTGTYRISEEKYNDIKKKEGVDSDSEFKFTLYKNDLLLIKDTETKEQRLFRFLSRSMPNKKHYVELKPYSKDKFEKNESLIEILGSADKSGRCIKGLAKSNLSIFKVRTDVLGNQHIIKNEGDKPKLDF

SEQ ID NO: 769 - protein, 1127 aa, Streptococcus salivarius
MSDLVLGLDIGIGSVGVGILNKVTGEIIHKNSRIFPAAQAENNVERRINRQGRRLTRRKKHRRVRLNHLFEESGLITDFTNVSINLNPYQLRVKGLTDELSNEELFIALKNMVKHRGISYLDDASDDGNSSVGDYAQIVKENSKQLETKTPGQIQLERYQKYGQLRGDFTVEEDGKKHRLINVFPTSAYRAEALRILQTQQEFNPQITDEFINSYLQILTGKRKYYHGPGNEKSRTDYGRYTTKKDSEDEYITLDNIFGILIGKCTFYPEEYRAAKASYTAQEFNLLNDLNNLTVPTETKKLSEEQKNQIITNVKNEKAMGPAKLFKYIAKLLSCDVADIKGYRIDKSDKAEIHTFEAYRKMKTLATIDIEQMERENLDKLAYVLTLNTEKEGIQEALEHEFADGTFSQEQIDELVQFRKANSSIFGKGWHSFSVKLMMELIPELYATSEEQMTILTRLGKQKTTSSSNKTKYIDEKQLTEEIYNPVAAKSVRQAIKIVNAAIKEYGDFDNIVIEMARETNEDDEKKAIQKIQKANKDEKDAAMLKAANQYNGKAELPHSVFHGHKQLATKIRLWHQQGERCLYTGKTISIHDLINNSNQFEIDHILPLSITFDDSLANKVLVYATANQEKGQRTPYQALDSMDDAWSFRELKAFVRDSKALSNKKKEYLLTEEDISKFDVRKKFIERNLVDTRYASRVVLNALQEHFRVHKTDTKVSVVRGQFTSQLRRHWGIEKTRDTYHHHAVDALIIAASSQLNLWKKQKNTLVSYSEDQLLDIETGELISDDEYKESVFKAPYQHFVDTLKSKEFEDSILFSYQVDSKFNRKISDATIYATRQAKVGKDKKDETYVLGKIKDIYSQTGYDAFIKIYKKDKSKFLMYRHDPQTFEKVIEPILENYPNKELNEKGKEVPCNPFLKYKEDHGYIRKYSKKGNGPEIKSLKYYDSKLGNHIDITPKNSNNKVVLQSVSPWRADVYFNKTTGKYEILGLKYADLKFEKGTGTYKISEEKYNDIKIKEGVDSDSEFKFTLYKNDLLLIKDTETKEQQLFRFLSRTMPNVKHYVELKPYDKQKFDDNEELIKILGIVAKGGQCKKGVSKPNISIYKIRTDVLGNQHIIKNEGDKPKLDF

SEQ ID NO: 770 - protein, 1385 aa, Streptococcus salivarius
MTKPYSIGLDIGTNSVGWAVITDDYKVPSKKMKVLGNTSKKYIKKNLLGALLFDSGITAEGRRLKRTARRRYTRRRNRILYLQEIFSTEMATLDDAFFQRLDDSFLVPDDKRDSKYPIFGNLVEEKVYHDEFPTIYHLRKHLADSSKKADLRLVYLALAHMIKYRGHFLIEGDFNSKNNDLQKNFQDFLDTYNAIFESDLSLENSKQLEEIVKDKISKSAKKDRILKLFPGEKNSGIFSEFLKLIVGNQADFRKYFNLDEKTSLQFSKESYDEDLETLLGHIGDDYSDVFLKAKKLYDAILLSGILTVTDNGTEAPLSSAMIMRYKEHEEDLALLKAYIRNISLETYNEVFKDNTKNGYAGYIDGKTSQEDFYVYLKRLLAGLEGADYFLEKIDREDFLRKQRTFDNGSIPYQIYLQEMRAILDKQAKFYPFLAKNKERIEKILTFRIPYYVGPLARGNSDFAWSIRKRNEKITPWNFEDVIDKESSAEAFINRMTSFDLYLPEEKVLPKHSLLYENFTVYNELTKVRFIAEGMRDYQFLDSKQKKDIVRLYFKGKRKVTDKDIIEYLHAIDGYDGIELKGIEKQFNSSLSTYHDLLNIINDKEFLDDSSNETIIEEIIHTLTMFEDREMIKQRLSKFDNIFDKSVLKKLSRRHYTGWGKLSAKLINGIRDEKSGNTILDYLIDDGVSNRNFMQLIHDDALSFKKKIKKAQIIGDKDNIKQVVKSLPGSPAIKKGILQSIKIVDELVKVMGREPESIVVEMARENQYTNQGKSNSQQRLKRLEESLKGLGSKILKENVPTRLSKIDNNALQNDRLYLYYLQNGKDMYTGEELDIDRLSNYDIDHIIPQAFLKDDSIDNKVLVSSASNRGKSDDVPSLEVVKKRKTLWYQLLKSKLISQRKFDNLTKAERGGLSQEEKAGFIQRQLVETRQITKHVARLLDERFNNKKDENNRTLRTVKIITLKSSLVSQFRKDFELYKVREINDFHHAHDAYLNAVVASALLKKYPKLEPEFVYGDYPKYNSFRERKSATEKVYFYSNIMNIFKKSIPLADGTVIDRPLIEVNEETGESVWNKVADLNTVRKVLSYSQVNIVKKVEEQNHGLDRGKPKGLFNANLSSKPKPNSKENLVGAKEYLDPKKYGGYAGISNSFAILVKGTIEKGAKKKITNVLEFQGISILDRIYYRKDKLNFLLEKGYKDIELIIELPKYSLFELSDGSRRMLASILSTNNKRGEIHKGNQIFISQKFVKLLYHAKRISSTFNENHRKYVENHKKEFEELFYYILEFNENYVGAKKNGELLKSAFQSWQNHSIDELCSSFIGPTGSERKGLFELTSRGGAADFEFLGVKIPRYRDYTPSSLLKDATLIHQSVTGLYETRIDLGKLGED

SEQ ID NO: 771 - protein, 1392 aa, Streptococcus sanguinis
MENKNYSIGLDIGTNSVGWAVITDDYKVPSKKMKVFGNTDKHFIKKNLIGALLFDEGATAEDRRLKRTARRRYTRRKNRLRYLQEIFSEEISKLDSSFFHRLDDSFLVPKDKRGSKYPIFATLEEEKEYHKKFPTIYHLRKHLADSKEKTDLRLIYLALAHMIKYRGHFLYEESFDIKNNDIQKIFNEFISIYDNTFEGSSLSGQNAQVEAIFTDKISKSAKRERVLKLFSDEKSTSLFSEFLKLIVGNQADFKKHFDLEEKAPLQFSKDTYDEDLENLLGQIGDGFTDLFLVAKKLYDAILLSGILTVTDPSTKAPLSASMIERYESHQKDLAALKQFIKNNLPKRYNEVFSDQSKDGYAGYIDGKTTQEAFYKYIKNLLSKFEGADYFLDKIEREDFLRKQRTFDNGSIPHQIHLQEMNAILRRQGEHYPFLKENREKIEKILTFRIPYYVGPLARGNRDFAWLTRNSDQAIRPWNFEEIVDKASSAEEFINKMTNYDLYLPEEKVLPKHSLLYETFAVYNELTKVKFIAEGLRDYQFLDSGQKKQIVNQLFKEKRKVTEKDIIHYLHNVDGYDGIELKGIEKQFNASLSTYHDLLKIIKDKEFMDDPKNEEILENIVHTLTIFEDREMIKQRLAQYDSIFDEKVIKALTRRHYTGWGKLSAKLINGICDKQTGDTILDYLIDDGKINRNFMQLINDDGLSFKEIIQKAQVVGKTDDVKQVVQELPGSPAIKKGILQSIKIVDELVKVMGYAPESIVIEMARENQTTARGKKNSQQRYKRIEDSLKNLAPGLDSNILKENPTDNIQLQNDRLFLYYLQNGKDMYTGKPLDIDQLSSYDIDHIIPQAFIKDDSIDNRVLTSSKDNRGKSDNVPSLEVVQKRKAFWQQLLDSKLISERKFNNLTKAERGGLDERDKVGFIRRQLVETRQITKHVAQILDASFNTEVNEKNQKIRTVKIITLKSNLVSNFRKEFELYKVREINDYHHAHDAYLNAVVAKAILKKYPKLEPEFVYGDYQKYDLKRYISRFKPSKEIEKATEKYFFYSNLLNFFKEEVHYADGIIVKRENIEYSKDTGEIAWNKEKDFATIKKVLSYPQVNIVKKTEIQTHGLDRGKPKGLFNSNPSPKPSEDSKENLVPIKQGLDPRKYGGYAGISNSYAVLVKAIVEKGAKKQQKTILEFQGISILDKINFENNKENYLLKKRYIEILSTITLPKYSLFEFPDGTRRRLASILSTNNKRGEIHKGNELVLPGKYTTLLYHAKNINKKLEPEHLEYVEKHRNDFAKLLECVLNFNDKYVGALKNGERIRQAFTDWETVDIEKLCFSFIGPENSKNAGLFELTSQGSASDFEFLGVKIPRYRDYAPSSLLKATLIHQSITGLYETRIDLSKLGED

SEQ ID NO: 772 - protein, 1377 aa, Streptococcus sanguinis
MKKPYSIGLDIGTNSVGWAVITDDYKVPSKKMKVLGNTDKHFIKKNLIGALLFDEGTTAEDRRLKRTSRRRYTRRKNRLRYLQEIFSEEISKLDSSFFHRLDDSFLVPEDKRGSKYPIFATLEEEKEYHKKFPTIYHLRKHLADSKEKTDLRLIYLALAHMIKYRGHFLYEESFDIKNNDIQKIFNEFISIYDNTFEGSSLSGQNAQVEAIFTDKISKSTKRERVLKLFSDEKSTGLFSEFLKLIVGNQADFKKHFDLEEKAPLQFSKDTYDEDLENLLGQIGDGFADLFLVAKKLYDAILLSGILTVTDPSTKAPLSASMIERYENHQEDLAALKQFIKNNLSEKYAEVFSDQSKDGYAGFIDGKTTQEAFYKYIKNLLSKLEGADYFLNKIEREDFLRKQRTFDNGSIPHQIHLQEMNAILRRQGEHYLFLKENREKIEKILAFRIPYYVGPLARGNRDFAWLTRNSDQAIRPWNFEEVVDKASSAEDFINKMTNYDLYLPEEKVLPKHSLLYETFAVYNELTKVKFIAEGLRDYQFLDSGQKKQIVNQLFKDKRKVTEKDIIHYLHNVDGYDGIELKGIEKQFNASLSTYHDLLKIIKDKEFMDNPKNGEILENIIHTLTIFEDREMIKQRLAQYDTLFDEKVIKALTRRHYTGWGKLSAKLINGIRDKQTGKTILEYLIDDGDCNRNFMQLINDDGLSFKEIIQKAQVVGKTDDVKQVVQEIPGSPAIKKGILQSIKIVDELVKVMGHNPESIVIEMARENQTTAKGKKNSQQRYKRIEDALKNLAPGLDSNILKENPTDNIQLQNDRLFLYYLQNGKDMYTGKAIDINQLSNYDIDHIIPQAFIKDDSLDNRVLTSSKDNRGKSDNVPSIEVVQKRKAFWQQLLDSKLISERKFNNLTKAKRGGLDERDKVGFIKRQLVETRQITKHVAQLLDTRFNTEVNEENQKIRTVKIITLKSNLVSNFRKEFGLYKVREINDYHHAHDAYLNAVVAKAILKKYPKLEPEFVYGDYQKYDLKRYILKSKASNTIDKATEKYFFYSNLLNFFKEKVRYADGTIKKRENIEYSNDTGEIAWNKEKDFATIKKVLSLPQVNIVKKTEEQTVGQNGGLFDNNIVSKKKVVDASKLIPIKSSLSPEKYGGYARPTIAYSVLVIADIEKGKGKAKKLKRIKEIVGITIQDKKKFESNPVTYLEECGYKNINSNLIIKLPKYSLFEFNDGQRRLLASSIELQKGNELILPYHLTALLYHAQRINKISEPIHKQYVEAHQNEFKELLTTIISLSKKYIQKPNVELLLQQAFDQADKDIYQLSESFISLLKLTSFGAPGAFKFLGVEISQSSVRYKPNSQFLDTTLIHQSITGLYETRIDLSKLGED

SEQ ID NO: 773 - protein, 1370 aa, Streptococcus sanguinis
MKKPYSIGLDIGTNSVGWAVVTDDYKVPAKKMRVFGDTDRSHIKKNLLGTLLFDDGNTAESRRLKRTARRRYTRRRNRILYLQEIFTESMNEIDESFFHRLDDSFLVPEDKRGSKYPIFATLQEEKEYHKQFPTIYHLRKQLADSKEKSDVRLIYLALAHMIKYRGHFLYEETFDIKNNDIQKIFNEFINIYDNTFEGSSLSGQNAQVEAIFTDKISKSAKRERVLKLFPDEKSTGLFSEFLKLIVGNQADFKKHFDLEEKAPLQFSKDTYDEELENLLGQIGDDFADLFLIAKKLYDAILLSGILTVTDPSTKAPLSASMIERYENHQKDLAALKQFIKNNLPEKYVEVFSDQSKDGYAGYIDGKTTQEAFYKYIKNLLSKFEGADYFLDKIEREDFLRKQRTFDNGSIPHQIHLQEMNAILRRQGEHYPFLKENREKIEKILTFRIPYYVGPLARDNRDFSWLTRNSDEPIRPWNFEEVVDKARSAEDFIHRMTNYDLYLPEEKVLPKHSLLYETFAVYNELTKVKFIAEGLRDYQFLDSGQKKQIVNQLFKEKRKVTEKDIIHYLHNVDGYDGIELKGIEKQFNANLSTYHDLLKITKDKEFMDDPKNEEILENIVHTLTIFEDREMIKQRLAQYDTLFDEKVIKALTRRHYTGWGKLSAKLINGIRDKQSGKTILDYLIDDDKINRNFMQLINDDGLSFKEIIQKAQVVGKTDDVKQVVQELPGSPAIKKGILQSIKIVDELVKVMGYALESIVIEMARENQTTARGKKNSQQRYKRIEDALKNLAPGLDSNILKENPTDNIQLKNDRLFLYYLQNGKDMYTGKPLDINQLSSYDIDHIIPQAFIKDDSIDNRVLTSSKDNRGKSDNVPSLEVVQKRKAFWQQLLDSKLISERKFNNLTKAERGGLDERDKVGFIRRQLVETQQITKNVAQILDARFNTEVKEKNQKIRTVKIITLKSNLVSNFRKEFGLYKVREINNYHHAHDAYLNAVVAKAILKKYPKLEPEFVYGDYQKYDLKKYISRFKPSKEIEKATEKYFFYSNLLNFFKEEVLYADGTIRKRENIEYSKDTGEIAWDKEKDFATIKKVLSYPQVNIVKKREVQTGGFSKESILPKGNSDKLIPRKTKDILWDTTKYGGFDSPVIAYSILLIADIEKGKAKKLKTVKTLVGITIMEKAAFEENPITFLENKGYHNVRKENILCLPKYSLFELENGRRRLLASAKELQKGNEIVLPVCLTTLLYHSKNLHKLDEPEHLEYIQKHRNEFKDLLNLVSEFSQKYILAEANLEKIKDLYADNEQADIEILANSFINLLTFTALGAPAAFKFFGKDVDRKRYTTVSEILNATLIHQSITGLYETRIDLSKLGEE

SEQ ID NO: 774 - protein, 1421 aa, Streptococcus sanguinis
MTKFNKNYSIGLDIGVSSVGYAVVTEDYRVPAFKFKVLGNTEKEKIKKNLIGSTTFVSAQPAKGTRVFRVNRRRIDRRNHRITYLRDIFQKEIEKVDKNFYRRLDESFRVLGDKSEDLQIKQPFFGDKELETAYHKKYPTIYHLRKHLADADKNSPVADIREVYMAISHILKYRGHFLTLDKINPNNINMQNSWIDFIESCQEVFDLEISDESKNIADIFKSSENRQEKVKKILPYFQQELLKKDKSIFKQLLQLLFGLKTKFKDCFELEEEPDLNFSKENYDENLENFLGSLEEDFSDVFAKLKVLRDTILLSGMLTYTGATHARFSATMVERYEEHRKDLQRFKFFIKQNLSEQDYLDIFGRKTQNGFDVDKETKGYVGYITNKMVLTNPQKQKTIQQNFYDYISGKITGIEGAEYFLNKISDGTFLRKLRTSDNGAIPNQIHAYELEKIIERQGKDYPFLLENKDKLLSILTFKIPYYVGPLAKGSNSRFAWIKRATSSDILDDNDEDTRNGKIRPWNYQKLINMDETRDAFITNLIGNDIILLNEKVLPKRSLIYEEVMLQNELTRVKYKDKYGKAHFFDSELRQNIINGLFKNNSKRVNAKSLIKYLSDNHKDLNAIEIVSGVEKGKSFNSTLKTYNDLKTIFSEELLDSEIYQKELEEIIKVITVFDDKKSIKNYLTKFFGHLEILDEEKINQLSKLRYSGWGRYSAKLLLDIRDEDTGFNLLQFLRNDEENRNLTKLISDNTLSFEPKIKDIQSKSTIEDDIFDEIKKLAGSPAIKRGILNSIKIVDELVQIIGYPPHNIVIEMARENMTTEEGQKKAKTRKTKLESALKNIENSLLENGKVPHSDEQLQSEKLYLYYLQNGKDMYTLDKTGSPAPLYLDQLDQYEVDHIIPYSFLPIDSIDNKVLTHRENNQQKLNNIPDKETVANMKPFWEKLYNAKLISQTKYQRLTTSERTPDGVLTESMKAGFIERQLVETRQIIKHVARILDNRFSDTKIITLKSQLITNFRNTFHIAKIRELNDYHHAHDAYLAVVVGQTLLKVYPKLAPELIYGHHAHFNRHEENKATLRKHLYSNIMRFFNNPDSKVSKDIWDCNRDLPIIKDVIYNSQINFVKRTMIKKGAFYNQNPVGKFNKQLAANNRYPLKTKALCLDTSIYGGYGPMNSALSIIIIAERFNEKKGKIETVKEFHDIFIIDYEKFNNNPFQFLNDTSENGFLKKNNINRVLGFYRIPKYSLMQKIDGTRMLFESKSNLHKATQFKLTKTQNELFFHMKRLLTKSNLMDLKSKSAIKESQNFILKHKEEFDNISNQLSAFSQKMLGNTTSLKNLIKGYNERKIKEIDIRDETIKYFYDNFIKMFSFVKSGAPKDINDFFDNKCTVARMRPKPDKKLLNATLIHQSITGLYETRIDLSKLGED

SEQ ID NO: 775 - protein, 317 aa, Streptococcus sp.
FEDSILFSYQVDSKFNRKISDATIYATRKAKLDKEKSEETYVLGKIKDIYSQAGYDAFIKIYNKDKSKFLMYHKDPQTFEKVIEEILRTYPSKELNDKNKEIPCNPFEKYRQENGPIRKYSKKSNGPEIKSLKYYDNKLGNHIDITPESSDNQVVLQSLKPWRTDVYFNHQTKKYELMGLKYSDLSFEKGSGKYSISNQKYNSIKRIEGIDEQSEFKFTLYKNDLILIKDSENNEQKLFRFNSRNDTAKHYIELKPYDKAKFDGEQELITILGNVAKGGRCLKGLNKSNISIFKVKTDVLGKKHIIKKEGDEPKLKF

SEQ ID NO: 776 - protein, 1420 aa, Streptococcus sp.
MAKFNKNYSIGLDIGVSSVGYAVVTEDYRVPAFKFKVLGNTEKEKIKKNLIGSTTFVPAQSAQGTRVFRVNRRRIDRRNHRIAYLRDIFQKEIEKIDKNFYRRLDESFRVLGDKSEDIQIKQPFFGNKELETAYHKKYPTIYHLRKHLADADKNSPVADIREVYMVLSHILKYRGHFLTLGKIDPNNINMQNSWIDFIESCQDAFDLEISDESKTIAAIFKSSENRQEKVKQILSYFQQELLKKDKSIFKQLLQLLFGLKTKFKDCFELEEEPDLNFSKENYDENLENLLGALEEDFSDVFAKLKILRDTILLSSMLTYTGATHARFSATMVERYEEHRKDLQRFKSFVKQNLSEQDYLDIFGRKTPTGFDVDKETKGYVGYISNKMVLTNPQKQKTIQQNFYDYISGKITGIEGAECFLNKISDGTFLRKLRTTDNGAIPNQIHAYELEKIIERQGRDYPFLLENKDKLLSILTFKIPYYVGPLAKGNNSRFAWIKRTTSQDVLDDNDEDTRNGKIRPWNYHKLINMDETRDAFIINLIGNDIILLNEKVLPKRSLIYEEVMLQNELTRVKYKDKYGKIHFFNSELRQEIINNLFKTNSKRVSSAMLLSYLENFTNLQAVEIVSGIEKGKSLNSTLKTYNDLKTIFSEELLDSEIYQKELEEIIKVITVFDDKKSIKNYLTKYFGHLEFLNEEKINQLSKLRYTGWGRYSGKLLLGIRDEDTGFNLMQFLRNDDENRNLTQLISDTTLSFDSAIKAIQSKSTVEDDVFEEIKNLAGSPAIKRGILNSIKIVDELVQIIGYPPQNIIIEMARENMTTEEGQKKAKTRKSKLESALKNIEDSVLESGKVPHSDEQLQSEKLYLYYLQNGKDMYSLDKTGSPTPLYRDQLDQYEVDHIIPYSFLPIDSIDNKVLTHRENNQRKLNNIPDKETVANMKPFWEKLYNAKLISQTKYQRLTTSERTPDGVLTESMKAGFIERQLVETRQIIKHVARILDNRFSDTKIITLKSQLVTNFRNTFHIAKIRELNDYHHAHDAYLAVVVGQTLLKAYPKLAPELIYGHHAHFNRHEENKATLRKHLYSNIMRFFNNPDSKVSKDIWDCNRDLPIVKDVIYNSQINFVKRTMIKKGAFYNQNPVGKLNKQIAANNRYPLKTKVSSLDTSIYGGYGPMNSALSIIIIAERFNEKKGKIETVKEFHDIFIIDYEKFNNNPFQFLNNVSEEGFLKKNDLNRVLAFYRISKYSLMQKIDGTRMLFESKSNLHKVTQFKLTKTQNELFFHMKRLLTKSNLMDLKSESAIKESQNFIQTHQNEFDNIADRLSNYSQKMLGETKSLQTLINGYNERPIKQIDNNEETIRYYYDNFIKMFSFVKSGAPKDIINFFNDKYTVPRMRPKPDRKMLDATLIHQSITGLYETRIDLSKLGED

SEQ ID NO: 777 - protein, 1371 aa, Streptococcus sp.
MENKNYSIGLDIGTNSVGWSVITDDYKVPSKKMKVLGNTDKHFIKKNLIGALLFDEGTTAEARRLKRTARRRYTRRKNRLRYLQEIFSEEIGKVDSSFFHRLDDSFLIPEDKRGSKYPIFATLAEEKKYHKQFPTIYHLRKQLADSKEKTDLRLIYLALAHMIKYRGHFLYEEAFDIKNNDIQKIFNEFISIYNNTFEGNSLSGQNVQVEAIFTDKISKSAKRERVLKLFPDEKSTGLFSEFLKLIVGNQADFKKHFDLEEKAPLQFSRDTYDEDLENLLGQIGDDFADLFLVAKKLYDAILLSGILTVTNPSTKAPLSASMIERYENHQKDLASLKQFIKNNLPEKYDEVFSDQSEDGYAGYIDGKTTQETFYKYIKNLLSKFEGADYFLDKIEREDFLRKQRTFDNGSIPHQIHLQEMNAILRRQGEHYPFLKENKEKIEKILTFRIPYYVGPLARGNRDFAWLTRNSDQAIRPWNFEEIVDKASSAEDFINKMTNYDLYLPEEKVLPKHSLLYETFAVYNELTKVKFIAEGLRDYQFLDSGQKKQIVTQLFKEKRKVTEKDIIQFLHNVDGYDGIELKGIEKQFNASLSTYHDLLKIIKDKAFMDDAKNEAILENIVHTLTIFEDREMIKQRLAQYDSLFDEKVIKALTRRHYTGWGKLSAKLINGISDKQTGNTILDYLIDDGEINRNFMQLINDDGLSFKEIIQKAQVVGKTNDVKQVVQELPGSPAIKKGILQSIKIVDELVKVMGHAPESIVIEMARENQTTARGKKNSQQRYKRIEDSLKILASGLNSKILKEHPTDNIQLQNDRLFLYYLQNGKDMYTGEALDINQLSSCDIDHIIPQAFIKDDSLDNRVLTSSKDNRGKSDNVPSLEVVDKMKVFWQQLLDSKLISYRKFNNLTKAERGGLNELDKVGFIKRQLVETRQITKHVAQILDARFNKEVTEKDKKNRTVKIITLKSNLVSNFRKEFELYKVREINDYHHAHDAYLNAVVAKAILKKYPKLEPEFVYGDYQKYDLKRYISRSKDPKEIEKATEKYFFYSNLLNFFKEEVHYADGTIVKRENIEYSKDTGEIAWNKEKDFATIKKVLSLPQVNIVKKREVQTGGFSKESILPKGNSDKLIPRKTKDILWDTTKYGGFDSPVIAYSILLIADIEKGKAKKLKTVKTLVGITIMEKDAFEKNPIAFLENKGYHNVCKENILCLPKYSLFELENGRRRLLASAKELQKCNEIVLPVYLTTLLYHSKNVHKLDEPGHLEYIQKHRNEFKDLLNLVSEFSQKYVLADANLEKIKNLYADNEQADIEILANSFINLLTFTALGAPAAFKFFGKDVDRKRYTTVSEILNATLIHQSITGLYETRIDLSKLGED

SEQ ID NO: 778 - protein, 93 aa, Streptococcus sp.
MILIKDSENNEQKLFRFNSRNDTAKHYVELKPYDKARFDGQQELITILGNVAKGGQCLKGLNKSNISIFKVKTDVLGKKHIIKKEGDEPKLKF

SEQ ID NO: 779 - protein, 1121 aa, Streptococcus sp.
MNGLVLGLDIGIASVGVGILEKNSGKIIHANSRLFPAATADNNVERRKNRQARRLHRRKKHRGVRFQDLFEDYGLLTDFSKVSINLNPYRLRVDGLNQQLTNEELFIALKNIVKRRGISYLDDASEDGGTVSSDYGKAVEENRKLLAEQTPGQIQLERFEKYGQVRGDFTVVENGEKRRLINVFSTSAYRKEAERILRKQQEFNSKITDEFIEDCLKILTGKRKYYHGPGNEKSRTDYGRFRTDGTTLDNIFGILIGKCTFYPDEYRASKASYTAQEFNLLNDLNNLTVPTETKKLSEEQKKVIVEYAKEAKTLGASTLLKYIAKMIDASVDQIRGYRVDVNNKPEIHTFEAYRKMQSLETISVGELSRNVLDELAHILTLNTEREGIEEAINTKLKDSFSQDQVLELVQFRKNNSSLFSKGWHNFSLKLMMELIPELYETSEEQMTILTRLGKQKSKEISKRTKYIDEKELTEEIYNPVVAKSVRQAIKIINEATKKHGIFDNIVIEMARENNEEDAKKDYIKRQKANQDEKNAAMEKAAFQYNGKKELPDSIFHGQKELATKIRLWHQQGEKCLYTGKNIPISDLIHNQYKYEIDHILPLSLSFDDSLSNKVLVLATANQEKGQRTPFQALDSMDDAWSYREFKSYVKESKLLGNKKKEYLLTEEDISKIEVKQKFIERNLIDTRYSSRVVLNALQDFYKAHKFDTTISVVRGQFTSQLRRKWGLEKSRETYHHHAVDALIIAASSQLRLWKKQNNPLIAYKEGQFVDSETGEIISLSDDEYKELVFKAPYDHFVDTLSSKTFEDSILFSYQVDSKFNRKISDATIYATRKAKLDKEKSEETYVLGKIKDIYSQAGYDAFIKIYNKDKSKFLMYHKDPQTFEKVIEEILRTYPSKELNDKNKEIPCNPFEKYRQENGPIRKYSKKSNGPEIKSLKYYDNKLGNHIDITPESSDNQVVLQSLKPWRTDVYFNHQTKKYELMGLKYSDLSFEKGSGKYSISNQKYNSIKRIEGIDEQSEFKFTLYKNDLILIKDSENNEQKLFRFNSRNDTAKHYIELKPYDKAKFDGEQELITILGNVAKGGRCLKGLNKSNISIFKVKTDVLGKKHIIKKEGDEPKLKF

SEQ ID NO: 780 - protein, 1026 aa, Streptococcus sp.
MNGLVLGLDIGIASVGVGILEKNSGKIIHANSRLFPAATADNNVERRKNRQARRLNRRKKHRGVRFQDLFEDYGLLTDFSKVSINLNPYRLRVDGLNQQLTNEELFIALKNIVKRRGISYLDDASEDGGAVSSDYGKAVEENRKLLAEQTPGQIQLERFEKYGQVRGDFTVVENGEKRRLINVFSTSAYRKEAEKILRKQQEFNNQITDEFIEDYLKILTGKRKYYHGPGNEKSRTDYGRFRTDGTTLDNIFGVLIGKCTFYPNEYRASKSSYTAQEFNLLNDLNNLTVPTETKKLSEEQKKVIVEYAKEAKTLGASTLLKYIVKMIDASVDQISGYRVDVNNKPEMHTFEVYRKMQSLETISVGELSRNVLDELAHILTLNTEREGIEEAINSKLMGVFSQDQVLELVQFRKNNSSLFSKGWHNFSLKLMMELIPELYETSEEQMTILTRLGKQKSKETSKRTKYIDEKELTEEIYNPVVAKSVRQAIKIINEATKKHGIFDNIVIEMARENNEEDAKKDYIKRQKANQDEKNAAMEKAAFQYNGKKELPGNIFNGHKELATKIRLWHQQGEKCLYTGKTIPISDLIHNQYKYEIDHILPLSLSFDDSLSNKVLVHATANQEKGQRTPFQALDSMDDAWSYREFKSYVKDLKSLSNKKKDYLLTEEDISKIEVKQKFIERNLVDTRYSSRVVLNALQDFYKSHQFDTTISVVRGQFTSQLRRKWGLEKSRETYHHHAVDALIIAASSQLRLWKKQNNPLITYKEGQFIDSQTGEIISLTDDEYKELVFKAPYDHFVDTLHSKTFEDGILFSYQVDSKYNRKISDATIYATRKAKLDKDKSEETYVLGKIKDIYSQAGYDAFIKIYNKDKRKFLMYHKDPQTFEKVIEEILRTYPSKERNDKNKEVPCNPFEKYRQENGPIRKYSKKGNGPEIKCLKYYDNKLGNYIDISPDGSDNQVVLQSLKPWRTDVYFNHQTKKYELMGLKYSDLSFEKGSGKYSISNEKYNSIKRIEGVNEQSEFKFTLYK

SEQ ID NO: 781 - protein, 1377 aa, Streptococcus sp.
MNNKPYSIGLDIGTNSVGWSVITDDYKVPSKKMKVLGNTDKRFIKKNLIGALLFDEGTTAEARRLKRTARRRYTRRKNRLRYLQEIFAEEMSKVDSSFFHRLDDSFLIPEDKRGSKYPIFATLVEEKEYHKQFPTIYHLRKQLADSKEKADLRLIYLVLAHMIKYRGHFLYEEAFDIKNNDIQKIFNEFISIYDNTFEGSSLSGQNAQVETIFTDKISKSAKRERVLKLFPDEKSTGLFSEFLKLIVGNQADFKKHFDLEEKAPLQFSKDTYDEDLENLLEQIGDDFADLFVAAKKLYDAILLSGILTVTDPSTKAPLSASMIERYENHQKDLAVLKQFIKTNLPEKYVEVFSDQSKDGYAGYIDGKTTQEAFYKYIKNLLSKFDGADYFLDKIEREVFLRKQRTFDNGSIPHQIHLQEMNTILRRQGEHYPFLKENKEKIEKILTFRIPYHVGPLARGNRDFAWLTRNSDQAIRPWNFEEIVDKASSAEDFINKMTNYDLYLPEEKVLPKHSLLYETFAVYNELTKVKFIAEGMRDYQFLDSGQKKKIINQLFKKKRKVTEDDIIDCLQKIDNYDGIELKGIEKQFNASLSTYHDILKIIRDKEFMDDPKNGDILENVIHTLTIFEDREMIKQRLAQYNSIFDEKVIKALSRKHYTGWGKLSAKLIDGIRDKQTGKTILDYLMDDGKSNRNFMQLIKDDELSFTEIIQKAQVVGDTDNLRQVVQNLPGSPAIKKGILQSIKIVDELVKVMGHAPESIVIEMARENQTTARGKKNSQQRYKRIEDSLKNLASGLDSNILKENPTDNIQLQNDRLFLYYLQNGKDMYTGEALNINQLSSYDIDHIIPQAFIKDDSLDNRVLTSSKDNRGKSDNVPSLEVVEKMKAFWQQLLDSKLISERKYNNLTKAERERGGLNELDKVGFIKRQLVETRQITKHVAQILDARFNKEVTEKNKKNRNVKIITLKSNMVSNFRKEFGLYKVREINDYHHAHDAYLNAVVAKAILKKYPKLEPEFVYGDYQKYDLKRYISRSKDPKEVEKATEKYFFYSNLLNFFKEEVHYADGTIVKRENIEYSKDTGEIAWNKEKDFATIKKVLSLPQVNIVKKTEEQTVGQNGGLFDNNIVSKKKVVDASKLIPIKSGLSPEKYGGYARPTIAYSVLVTYKQNNKIKNTMVGIPVLTKLEFERDPNLYLRNLGINNVSHVIKLVKYTVLEFKHKYGTYRRFIVSNQELKRANQIFVTTKQMKLISQYTTLDKNEHDSLLKNNQQLIQSIWNQFLEFMLATDLVNKKQYDELILTNNQTIEECRNIMNRVITTLSFTNINAGQKKIIFDDTLSLPIKRWQFTDSDKMVKKIIESTLIHQSITGLYETRIDLSKLGED

SEQ ID NO: 782 - protein, 1371 aa, Streptococcus sp.
MNNNNYSIGLDIGTNSVGWAVITDDYKVPSKKMRVLGNTDKRFIKKNLIGALLFDEGTTAEDRRLKRTARRRYTRRKNRLRYLQEIFAEEMSKVDSSFFHRLDDSFLVPEDKSGSKYPIFATLAEEKEYHKKFPTIYHLRKHLADSKEKADLRLIYLALAHITKYRGHFLYEEAFDIKNNDIQKIFNEFINIYDNTFEGSSLSGQNAQVEAIFTGKISKSVKREHVLKLFPDEKSTGLFSEFLKLIVGNQADFKKHFDLEEKASLQFSKDTYDEDLENLLGQIGDDFADLFLVAKKLYDAILLSGILTVTDPSTKAPLSASMIERYENHQEDLAALKQFIKNNLPEKYAEVFSDQSKDGYAGYIDGKTTQEAFYKYIKNLLSKFEGADYFLDKIEREDFLRKQRTFDNGSIPHQIHLQEMNAILRRQGEHYPLLKENKEKIEKILTFRIPYYVGPLARGNRDFAWLTRNSDQAIRPWNFEEIVDKASSAESFINKMTNYDLYLPEEKVLPKHSLLYETFAVYNELTKVKFIAEGLRDYQFFDSGQKKQIVNQLFKEKRKVTEKDIIHYLHNVDGYDGIELKGIEKQFNASLSTYHDLLKIIKDKEFMDNHKNQEILENIVHTLTIFEDREMIKQRLAQYDSIFDEKVIKALTRRHYTGWGKLSAKLINGICDKKTGKTILDYLIDDGYNNRNFMQLINDDGLSFKEIIQKAQVVGKTDDLTQVVRELSGSPAIKKGILQSIKIVDELVKIMGYAPESIVIEMARENQTTAKGKKNSQQRYKRIEDALKNLAPGLDSTISKENPTDNIQLQNDRLFLYYLQNGKDMYTGEALDINQLSSYDIDHIIPQAFIKDDSLDNRVLTSSKDNRGKSDNVPSLEVVKKRKAFWQQLLDSKLISERKFNNLTKAERGGLDERDKVGFIKRQLVETRQITKHVARILDARFNTEVSEKNQKIRSVKIITLKSNLVSNFRKEFKLYKVREINDYHHAHDAYLNAVVAKAILKKYPKLEPEFVYGDYQKYDLKRYISKSKDPKEVEKATEKYFFYSNLLNFFKEEVHYADGTIVKRENIEYSKDTGEIAWNKEKDFVTIKKVLSYPQVNIVKKREVQTGGFSKESILPKGNSDKLIPRKTKDILWDTTKYGGFDSPVIAYSILLIADIEKGKAKKLKTVKTLVGITIMEKAAFEKNPITFLENKGYHNVRKENILCLPKYSLFELENGRRRLLASAKELQKGNEIVLPVYLTTLLYHSKNVHKLDEPEHLEYIQKHRYEFKDLLNLVSEFSQKYVLAEANLEKIKSLYVDNEQADIEILANSFINLLTFTALGAPAAFKFFGKDVDRKRYTTVSEILNATLIHQSITGLYETRIDLSKLGED

SEQ ID NO: 783 - protein, 1139 aa, Streptococcus sp.
MSDLVLGLDIGIGSVGVGILNKVTGEIIHKNSRIFPAAQAENNLERRTNRQGRRLTRRKKHRRVRLNHLFEESGLITDFTKVSINLNPYQLRVKGLTAELSNEELFIALKNMVKHRGISYLDDASDDGNSSVGDYAQIVKENSKQLETKTPGQIQLERYQKYGQLRGDFTVEEDGRKHRLINVFPTSAYHAEALRILQTQQEFNPQITDEFINSYLEILTGKRKYYHGPGNEKSRTDYGKYTTKKDAQGQYITLNNIFGILIGKCTFYPEEYRAAKASYTAQEFNLLNDLNNLTVPTETKKLSEEQKYQIITYVKNEKAMGPAKLFKYIAKLLSCDVADIKGYRIDKSDKAEIHTFEAYRKMKTLETLDVKKMAREELDKLAYVLTLNTEREGIQEALDHEFADGTFSQEQVDELVQFRKANSSIFGKGWHSFSVKLMMELIPELYATSEEQMTILTRLGKQKTTSSSNKTKYIDEKQLTEEIYNPVVAKSVRQAIKIVNAAIKKYGDFDNIVIEMARETNEDDEKKAIQKIQKANKAEKDAAMRKAANQYNGKAELPHSVFHGHKQLATKIRLWHQQGERCLYTGKTISIHDLINNPNQFEIDHILPLSITFDDSLANKVLVYATANQEKGQRTPYQALDSMDDAWSFRELKAFVRESKALSNKKKEYLLTEEDISKFDVRKKFIERNLVDTRYASRVVLNALQEHFRTHKIDTKVSVVRGQFTSQLRRHWGIEKTRDTYHHHAVDALIIAASSQLNLWKKQKNTLVSYSEDQLLDIETGELISDDEYKESVFKAPYQHFVDTLKSKEFEDSILFSYQVDSKFNRKISDATIYATRKAKLDKEKKEYTYTLGKIKDIYALGTKTPSKTGFYKFLDLYKKDKSQFLMYQKDRRTWDEVIEKILEQYRPFKEKDKNGKEVDFNPFEKYRIENGPIRKYSRKGNGPEIKSLKYYDNLLGRFVDITPSESKNPVALLSLNPWRTDVYYNTETRKYEFLGLKYADLCFEKGGSYGISKVKYNKIREKEGIGKNSEFKFTLYKNDLILIKDTETNRQQIFRFWSRTGKDNPKSFEKHKLELKPYEKTRFEKGEELKVLGKVPPSSNRLQKNMQIENLSIYKVRTDVLGNQHIIKNEGDKPKLDF

SEQ ID NO: 784 - protein, 1375 aa, Streptococcus sp.
MSNKSYSIGLDIGTNSVGWAVITDDYKVPSKKMKVLGNTDKHFIKKNLIGALLFDEGTTAEDRRLKRTARRRYTRRKNRLRYLQEIFSQEISKVDSSFFHRLDDFFLVPEDKRGSKYPIFATLVEEKEYHKKFPTIYHLRKHLADSKEKTDLRLIYLALAHMIKYRGHFLYEESFDIKNNDIQKIFSEFISIYDNTFEGKSLSGQNAQVEAIFTDKISKSTKRERVLKLFPDEKSTGLFSEFLKLIVGNQADFKKHFDLEEKAPLQFSKDTYDEDLENLLGQIGDDFADLFLVAKKLYDAILLSGILTVKDLSTKAPLSASMIERYENHQKDLAALKQFIQNNLQEKYDEVFSDQSKDGYAGYIDGKTTQEAFYKYIKNLLSKFEGADYFLDKIEREDFLKKQRTFDNGSIPHQIHLQEMNAIIRRQGEHYPFLQENKEKIEKILTFRIPYYVGPLARGNGDFAWLTRNSDQAIRPWNFEEIVDQASSAEDFINKMTNYDLYLPEEKVLPKHSLLYETFAVYNELTKVKFIAEGLTRYQFLDKKQKKDIFDTFFKAENKRKVTEKDIIHYLHNVDGYDGIELKGIEKQFNASLSTYHDLLKIIKDKAFMDDSKNEEILENIIHTLTIFEDREMIKQRLAQYDSLFDEKVIKALTRRHYTGWGKLSAKLINGIRDKKSGKTILDYLIDDGEINRNFMQLIHDDGLSFKEIIQKAQVFGKTNDVKQVVQELPGSPAIKKGILQSIKIVDELVKVMGHAPESIVIEMARENQTTARGKKNSQQRYKRIEDSLKNLASGLDSNILKENPTDNIQLQNDRLFLYYLQNGRDMYTGKPLEINQLSNYDIDHIIPQAFIKDDSLDNRVLTSSKDNRGKSDNVPSLEVVEKMKAFWQQLLDSKLISERKFNNLTKAERERGGLNELDKVGFIKRQLVETRQITKHVAQFLDARFNKEVTEKDKKNRNVKIITLKSNLVSNFRKEFGLYKVREINDYHHAHDAYLNAVLAKAILKKYPKLEPEFVYGDYQKYDLQRYISKSREPKEVEKATQKYFFYSNLLNFFKEEVHYADGTIVKRENIEYSKDTGEIAWNKEKDFATVKKVLSLPQVNIVKKTEVQTGGFSKESILPKGNSDKLIPRKTKEILWDTTKYGGFDSPVIAYSILLIADIEKGKAKKLKTVKTLVGITIMEKATFEKNPITFLENKGYHNVRKENILCLPKYSLFELESGRRRMLASAKELQKGNEIVLPVYLTTLLYHSKNVHKLDEPEHLEYIQKHRYEFKDLLNLVSEFSQKYVLADANLEKIKNLYADNEQADIEILANSFINLLTFTALGAPAAFKFLGKDVDRKRYTTVSEILNATLIHQSITGLYETRIDLSKLGED

SEQ ID NO: 785 - protein, 206 aa, Streptococcus sp.
RTPFQALDSMDDAWSYREFKSYVKESKLLGNKKKEYLLTEEDISKIEVKQKFIERNLIDTRYSSRVVLNALQDFYKAHKFDTTISVVRGQFTSQLRRKWGLEKSRETYHHHAVDALIIAASSQLRLWKKQNNPLIAYKEGQFVDSETGEIISLSDDEYKELVFKAPYDHFVDTLSSKTFEDSILFSYQVDSKFNRKISDATIYATR

SEQ ID NO: 786 - protein, 1122 aa, Streptococcus suis
MSNGKILGLDIGIASVGVGVIDAQTGEIIHASSRIFPSANAANNAERRTFRGSRRLIRRKKHRIKRLDDLFNDFHINLDGEMSTDNPYVLRVKGLSQKLTVEELYISIKNIMKRRGISYLDDAESDNEAGRSDYAKAIERNRQLLTSKTPGEIQLERLEKYGQLRGNFTIIDEEGQSQQIINVFSTSDYVKEVEKILDCQKMYHKFISDEFCDKLIELLREKRKYYVGPGNEKSRTDYGIYRTDGTTLENLFGILIGKCTFYPDQYRSSRASYTAQEFNFLNDLNNLTVPTETKKLSQEQKEFLVNYAKETSVLGAGKILQQIAKLADCKVEDIRGYRLDNKDKPELHTFETYRAMKGLVPLVDIGVLSREQLDILADILTLNTDFEGIREALKKQLPNVFDEKQVKGLASFRKSKSQLFAKGWHNLSQKIMLEVIPELYATSDEQMTILTRLGKFEKSSVAEYPSSINVDEITDEIYNPVVAKSIRQTIKIINASIKKWDEFDQIVIEMPRDRNEDEEKKRIADGQKANAKEKADSILRAAELYCAGKVLPDYVYNGHNQLATKIRLWYQQGERCIYTGQPISIHDLIHNQNQYEIDHILPLSLTFDDSLSNKVLVLATANQEKAQRTPYNYLKSATSAWSYREFKDYVTKRKGIGKKKCEYLTFEEDINGFEVRSKFIQRNLVDTRYASKVILNALQDYFKISGIQTKVSVVRGQFTSQLRHKWGIEKTRETYHHHAVDALIIAASSQLRLWKKQESPLVVDYQEGRQVDLETGEILELTDEQYKELVYQPPYQGFVNTISSSAFDNEILFSYQVDSKVNRKISDATIYATRNAQLGKDKTEGIYVLGKIKDIYTQAGYEAFLKRYTKDKTSFLMYHKDLDTWEKVIEIILRDYREYDEKGKEIGNPFERYRRENGYVKKYSRKGNGTAIKSLKYYDNKLGNHIDITPENSRNAVVLQSLKPWRTDVYFNKETGKYEFLGIKYSDLSFEKGTGEYGISQEKYDSIKIAEGVAKKSIFKFTLYKQDLLFIKDIENNFGKLLRFTSKNDTSKHYVELKPYDKNKFGTEEPLLPVLGNVAKSGQCIKGLNKSNISIYKVRTDILGYRHFIKQEGEHPQLKFKK

SEQ ID NO: 787 - protein, 1381 aa, Streptococcus suis
MVKKKYAIGIDIGTNSVGWSIVTDDYKVPSKKMKVFGNTEKRYIKKNLLGTLLFDEGNTAENRRLKRTARRRYTRRRNRILYLQEIFAEEINKIDDSFFQRLDDSFLIVEDKQGSKHPIFGTLQEEKEYHKQFPTIYHLRKQLADSSQKADIRLIYLALAHIIKYRGHFLFEGDLKSENKDVQHLFNDFVEMFDKTVEGSYLSENLPNVADVLVEKVSKSRRLENILHYFPNEKKNGLFGNFLALALGLQPNFKTNFELAEDAKIQFSKETYEEDLEELLGKIGDDYADLFIATKSLYDGILLAGILSTTDSTTKAPLSSSMVNRYEEHQKDLALLKNFIHQNLSDSYKEVFNDKLKDGYAGYIEGKTTQENFYRFIKKAIEKIEGSNYFIDKIDREDFLRKQRTFDNGSIPHQIHLQEMHAIIRRQAEFYPFLVENQDKIEKILTFRIPYYVGPLARGKSEFAWLNRKSDEKIRPWNFDEMVDKETSAENFITRMTNYDRYLPDQKVLPKHSLLYEKFAVYNELTKVKFIAEGMRDYQFLDSGQKKDIVKTLFKTKRKVTAKDIKAYLENSNGYAGVELKGLEEQFNASLPTYHDLLKILRDKAFIDAEENQEILEDIVLTLTLFEDREMIRKRLEKYKDILTEEQRKKLERRHYTGWGRLSAKLINGILDKVTRKTILGYLIDDGTSNRNFMQLINDDTLSFVDEIRLAQGSGEAEDYRAEVQNLAGSPAIKKGILQSLKIVDELIEVMGYEPEHIVVEMARENQFTNQGRRNSQQRINRLENALKDFGSKILEEQKPYGVSKVNNIHLQSDRLFLYYLQNGKDMYTDEELDIDHLSEYDIDHIIPQAFIKDDSLDNKVLTKSAKNRGKSDDVPSMEIVHNRKNFWRQLLKSKLISQRKFDNLTKAERGGLTNEDKARFIQRQLVETRQITKHVARMLDTRFNTKLDEAGNRIRDPKVNIITLKSNLVSQFRKDYQLYKIREINNYHHAHDAYINAVVATALLKKYPQLAPEFVYGEYPTYNSYNSRKSATEKVLFYSNIMNFFKRIVVHSKTGEVRIRPVIEVNKETGEIVWDKKSDFRTVRKVLSYPQVNVVKKTEVQNHGLDRGKPKGFYNANLSPRPKEGSVENLVPAKQSFDTKRYGGYAGISNSYAVLVNGIIEKGKKKSKAEVTEFQGISILARKDFDKNPKQYLLNLGYKDIKSIIKLPKYSLFELENGSRRMLASILSTNNKRGEIHKGNEMYLPDKFVTLLYHAMRVNRTLEPGHKKYVETHRHVFDELLIYILEYNEKIVGAKANGKRIVEAYSARKDTDNLEELCNSFINLLNLTALGSAVDFEFLGTKIPRYRDYTPSSLLKATLIHQSVTGLYETRIDLSKLGGD

SEQ ID NO: 788 - protein, 39 aa, Streptococcus thermophilus
GRCIKGLGKSNISIYKVRTDVLGNQHIIKNEGDKPKLDF

SEQ ID NO: 789 - protein, 302 aa, Streptococcus thermophilus
MIRRKKHRIVRLNRLFEESGLITDFTKISINLNPYQLRVKGLTDELSNEELFIALKNMVKHRGISYLDDASDDGNSSVGDYAQIVKENSKQLETKTPGQIQLERYQTYGQLRGDFTVEKDGKKHRLINVFPTSAYRSEALRILQTQQEFNPQITDEFINRYLEILTGKRKYYHGPGNEKSRTDYGRYRTSGETLDNIFGILIGKCTFYPDEFRAAKASYTAQEFNLLNDLNNLTVPTETKKLSKEQKNQIINYVKNEKAMGPAKLFKYIAKLLSCDVADIKGYRIDKSGKAERFILSKPIEK

SEQ ID NO: 790 - protein, 1121 aa, Streptococcus thermophilus
MSDLVLGLDIGIGSVGVGILNKVTGEIIHKNSRIFPAAQAENNLVRRTNRQGRRLTRRKKHRIVRLNRLFEESGLITDFTKISINLNPYQLRVKGLTDELSNEELFIALKNMVKHRGISYLDDASDDGNSSVGDYAQIVKENSKQLETKTPGQIQLERYQTYGQLRGDFTVEKDGKKHRLINVFPTSAYRSEALRILQTQQEFNPQITDEFINRYLEILTGKRKYYHGPGNEKSRTDYGRYRTSGETLDNIFGILIGKCTFYPDEFRAAKASYTAQEFNLLNDLNNLTVPTETKKLSKEQKNQIINYVKNEKAMGPAKLFKYIAKLLSCDVADIKGYRIDKSGKAEIHTFEAYRKMKTLETLDIEQMDRETLDKLAYVLTLNTEREGIQEALEHEFADGSFSQKQVDELVQFRKANSSIFGKGWHNFSVKLMMELIPELYETSEEQMTILTRLGKQKTTSSSNKTKYIDEKLLTEEIYNPVVAKSVRQAIKIVNAAIKEYGDFDNIVIEMARETNEDDEKKAIQKIQKANKDEKDAAMLKAANQYNGKAELPHSVFHGHKQLATKIRLWHQQGERCLYTGKTISIHDLINNSNQFEVDHILPLSITFDDSLANKVLVYATANQEKGQRTPYQALDSMDDAWSFRELKAFVRESKTLSNKKKEYLLTEEDISKFDVRKKFIERNLVDTRYASRVVLNALQEHFRAHKIDTKVSVVRGQFTSQLRRHWGIEKTRDTYHHHAVDALIIAASSQLNLWKKQKNTLVSYSEDQLLDIETGELISDDEYKESVFKAPYQHFVDTLKSKEFEDSILFSYQVDSKFNRKISDATIYATRQAKVGKDKADETYVLGKIKDIYTQDGYDAFMKIYKKDKSKFLMYRHDPQTFEKVIEPILENYPNKQMNEKGKEVPCNPFLKYKEEHGYIRKYSKKGNGPEIKSLKYYDSKLGNHIDITPKDSNNKVVLQSVSPWRADIYFNNTTGKYEILGLKYADLQFEKGTGTYKISQEKYNDIKKKEGVDSDSEFKFTLYKNDLLLVKETETKEQQLFRFLSRTMPKQKHYVELKPYDKQKFEGGEALIKVLGNVANGGQCIKGLGKSNISIYKVRTDVLGNQHIIKNEGDKPKLDF

SEQ ID NO: 791 - protein, 1121 aa, Streptococcus thermophilus
MSDLVLGLDIGIGSVGVGILNKVTGEIIHKNSRIFPAAQAENNLVRRTNRQGRRLTRRKKHRIVRLNRLFEESGLITDFTKISINLNPYQLRVKGLTDELSNEELFIALKNMVKHRGISYLDDASDDGNSSVGDYAQIVKENSKQLETKTPGQIQLERYQTYGQLRGDFTVEKDGKKHRLINVFPTSAYRSEALRILQTQQEFNPQITDEFINRYLEILTGKRKYYHGPGNEKSRTDYGRYRTSGETLDNIFGILIGKCTFYPDEFRAAKASYTAQEFNLLNDLNNLTVPTETKKLSKEQKNQIINYVKNEKAMGPAKLFKYIAKLLSCDVADIKEYRIDKSGKAEIHTFEAYRKMKTLETLDIEQMDRETLDKLAYVLTLNTEREGIQEALEHEFADGSFSQKQVDELVQFRKANSSIFGKGWHNFSVKLMMELIPELYETSEEQMTILTRLGKQKTTSSSNKTKYIDEKLLTEEIYNPVVAKSVRQAIKIVNAAIKEYGDFDNIVIEMARETNEDDEKKAIQKIQKANKDEKDAAMLKAANQYNGKAELPHSVFHGHKQLATKIRLWHQQGERCLYTGKTISIHDLINNSNQFEVDHILPLSITFDDSLANKVLVYATANQEKGQRTPYQALDSMDDAWSFRELKAFVRESKTLSNKKKEYLLTEEDISKFDVRKKFIERNLVDTRYASRVVLNALQEHFRAHKIDTKVSVVRGQFTSQLRRHWGIEKTRDTYHHHAVDALIIAASIQLNLWKKQKNTLVSYSEDQLLDIETGELISDDEYKESVFKAPYQHFVDTLKSKEFEDSILFSYQVDSKFNRKISDATIYATRQAKVGKDKADETYVLGKIKDIYTQDGYDAFMKIYKKDKSKFLMYRHDPQTFEKVIEPILENYPNKQINEKGKEVPVNPFLKYKEEHGYIRKYSKKGNGPEIKSLKYYDSKLGNHIDITPKDSNNKVVLQSVSPWRADVYFNKTTGKYEILGLKYADLQFEKGTGTYKISQEKYNDIKKKEGVDSDSEFKFTLYKNDLLLVKDTETKEQQLFRFLSRTMPKQKHYVELKPYDKQKFEGGEALIKVLGNVANSGQCKKGLGKSNISIYKVRTDVLGNQHIIKNEGDKPKLDF

SEQ ID NO: 792 - protein, 1121 aa, Streptococcus thermophilus
MSDLVLGLDIGIGSVGVGILNKVTGEIIHKNSRIFPAAQAENNLVRRTNRQGRRLTRRKKHRRVRLNRLFEESGLITDFTKISINLNPYQLRVKGLTDELSNEELFIALKNMVKHRGISYLDDASDDGNSSVGDYAQIVKENSKQLETKTPGQIQLERYQTYGQLRGDFTVEKDGKKHRLINVFPTSAYRSEALRILQTQQEFNPQITDEFVNRYLEILTGKRKYYHGPGNEKSRTDYGRYRTNGETLDNIFGILIGKCTFYPEEFRAAKASYTAQEFNLLNDLNNLTVPTETKKLSKEQKNQIINYVKNEKAMGPAKLFKYIAKLLSCDVADIKGYRIDKSGKAEIHTFEAYRKMKTLETLDIEQMDRETLDKLAYVLTLNTEREGIQEALEHEFADGSFSQKQVDELVQFRKANSSIFGKGWHNFSVKLMMELIPELYETSEEQMTILKRLGKQKTTSSSNKTKYIDEKLLTEEIYNPVVAKSIRQAIKIVNAAIKEYGDFDNIVIEMARETNEDDEKKAIQKIQKANKDEKDAAMLKAANQYNGKAELPHSVFHGHKQLATKIRLWHQQGERCLYTGKTISIHDLINNPNQFEVDHILPLSITFDDSLANKVLVYATANQEKGQRTPYQALDSMDDAWSFRELKAFVRESKTLSNKKKEYLLTEEDISKFDVRKKFIERNLVDTRYASRVVLNALQEHFRAHKIDTKVSVVRGQFTSQLRRHWGIEKTRDTYHHHAVDALIIAASSQLNLWKKQKNTLVSYSEDQLLDIETGELISDDEYKESVFKAPYQHFVDTLKSKEFEDSILFSYQVDSKFNRKISDATIYATRQAKVGKDKKDETYVLGKIKDIYTQDGYDAFMKIYKKDKSKFLMYRHDPQTFEKVIEPILENYPNKEMNEKGKEVPCNPFLKYKEEHGYIRKYSKKGNDPEIKSLKYYDSKLGNHIDITPKDSNNKVVLQSVSPWRADVYFNKTTGKYEILGLKYADLQFEKGTGTYKISQEKYNDIKKKEGVDSDSEFKFTLYKNDLLLVKDTETKEQQLFRFLSRTMPKQKHYVELKPYDKQKFEGGEALIKVLGNVANSGQCKKGLGKSNISIYKVRTDVLGNQHIIKNEGDKPKLDF

SEQ ID NO: 793 - protein, 1122 aa, Streptococcus thermophilus
MSDLVLGLDIGIGSVGVGILNKVTGEIIHKNSRIFPAAQAENNVERRTNRQGRRLTRRKKHRRVRLNRLFEESGLITDFTKISINLNPYQLRVRGLTDELSNEELFIALKNMVKHRGISYLDDASDDGNSSVGDYAQIVKENSKQLETKTPGQIQLERYQTYGQLRGDFTVEKDGKKHRLINVFPTSAYRSEALRILQTQQEFNSQITDEFINRYLEILTGKRKYYHGPGNEKSRTDYGRYRTSGETLDNIFGILIGKCTFYPEEFRAAKASYTAQEFNLLNDLNNLTVPTETKKLSKEQKNQIINYVKNEKAMGPAKLFKYIAKLLSCDVADIKGYRIDKSGKAEIHTFEAYRKMKTLETLDIEQMDRETLDKLAYVLTLNTEREGIQEALEHEFADGSFSQKQVDELVQFRKASSSIFGKGWHNFSVKLMMELIPELYETSEEQMTILTRLGKQKTTSSSNKTKYIDEKLLTEEIYNPVVAKSVRQAIKIVNAAIKEYGDFDNIVIEMARETNEDDEKKAIQKIQKANKDEKDAAMLKAANQYNGKAELPHSVFHGHKQLATKIRLWHQQGERCLYTGKTISIHDLINNPNQFEVDHILPLSITFDDSLANKVLVYATANQEKGQRTPYQALDSMDDAWSFRELKAFVRESKTLSNKKKEYLLTEEDISKFDVRKKFIERNLVDTRYASRVVLNALQEHFRAHKIDTKVSVVRGQFTSQLRRHWGIEKTRDTYHHHAVDALIIAASSQLNLWKKQKNTLVSYSEDQLLDIETGELISDDEYKESVFKAPYQHFVDTLKSKEFEDSILFSYQVDSKFNRKLSDATIYATRQAKVGKDKKDETYVLGKIKDIYTQDGYDAFMKIYKKDKSKFLMYRHDPQTFEKVIEPILENYPNKEMNEKGKEVPCNPFLKYKEEHGYIRKYSKKGNGPEIKSLKYYDSKLLGNPIDITPENSKNKVVLQSLKPWRADVYFNKTTGKYEILGLKYADLQFEKKTGTYKISQEKYNGIMKEEGVDSDSEFKFTLYKNDLLLVKDTETKEQQLFRFLSRTMPNVKYYVELKPYSKDKFEKNESLIEILGSADKSGRCIKGLGKSNISIYKVRTDVLGNQHIIKNEGDKPKLDF

SEQ ID NO: 794 - protein, 1388 aa, Streptococcus thermophilus
MTKPYSIGLDIGTNSVGWAVITDNYKVPSKKMKVLGNTSKKYIKKNLLGVLLFDSGITAEGRRLKRTARRRYTRRRNRILYLQEIFSTEMATLDDAFFQRLDDSFLVPDDKRDSKYPIFGNLVEEKAYHDEFPTIYHLRKYLADSTKKADLRLVYLALAHMIKYRGHFLIEGEFNSKNNDIQKNFQDFLDTYNAIFESDLSLENSKQLEEIVKDKISKLEKKDRILKLFPGEKNSGIFSEFLKLIVGNQADFRKCFNLDEKASLHFSKESYDEDLETLLGYIGDDYSDVFLKAKKLYDAILLSGFLTVTDNETEAPLSSAMIKRYNEHKEDLALLKEYIRNISLKTYNEVFKDDTKNGYAGYIDGKTNQEDFYVYLKNLLAEFEGADYFLEKIDREDFLRKQRTFDNGSIPYQIHLQEMRAILDKQAKFYPFLAKNKERIEKILTFRIPYYVGPLARGNSDFAWSIRKRNEKITPWNFEDVIDKESSAEAFINRMTSFDLYLPEEKVLPKHSLLYETFNVYNELTKVRFIAESMRDYQFLDSKQKKDIVRLYFKDKRKVTDKDIIEYLHAIYGYDGIELKGIEKQFNSSLSTYHDLLNIINDKEFLDDSSNEAIIEEIIHTLTIFEDREMIKQRLSKFENIFDKSVLKKLSRRHYTGWGKLSAKLINGIRDEKSGNTILDYLIDDGISNRNFMQLIHDDALSFKKKIQKAQIIGDEDKGNIKEVVKSLPGSPAIKKGILQSIKIVDELVKVMGGRKPESIVVEMARENQYTNQGKSNSQQRLKRLEKSLKELGSKILKENIPAKLSKIDNNALQNDRLYLYYLQNGKDMYTGDDLDIDRLSNYDIDHIIPQAFLKDNSIDNKVLVSSASNRGKSDDFPSLEVVKKRKTFWYQLLKSKLISQRKFDNLTKAERGGLLPEDKAGFIQRQLVETRQITKHVARLLDEKFNNKKDENNRAVRTVKIITLKSTLVSQFRKDFELYKVCEINDFHHAHDAYLNAVIASALLKKYPKLEPEFVYGDYPKYNSFRERKSATEKVYFYSNIMNIFKKSISLADGRVIERPLIEVNEETGESVWNKESDLATVRRVLSYPQVNVVKKVEEQNHGLDRGKPKGLFNANLSSKPKPNSNENLVGAKEYLDPKKYGGYAGISNSFAVLVKGTIEKGAKKKITNVLEFQGISILDRINYRKDKLNFLLEKGYKDIELIIELPKYSLFELSDGSRRMLASILSTNNKRGEIHKGNQIFLSQKFVKLLYHAKRISNTINENHRKYVENHKKEFEELFYYILEFNENYVGAKKNGKLLNSAFQSWQNHSIDELCSSFIGPTGSERKGLFELTSRGSAADFEFLGVKIPRYRDYTPSSLLKDATLIHQSVTGLYETRIDLAKLGEG

SEQ ID NO: 795 - protein, 1388 aa, Streptococcus thermophilus
MTKPYSIGLDIGTNSVGWAVITDNYKVPSKKMKVLGNTSKKYIKKNLLGVLLFDSGITAEGRRLKRTARRRYTRRRNRILYLQEIFSTEMATLDDAFFQRLDDSFLVPDDKRDSKYPIFGNLVEEKAYHDEFPTIYHLRKYLADSTKKADLRLVYLALAHMIKYRGHFLIEGEFNSKNNDIQKNFQDFLDTYNAIFESDLSLENSKQLEEIVKDKISKLEKKDRILKLFPGEKNSGIFSEFLKLIVGNQADFRKCFNLDEKASLHFSKESYDEDLETLLGYIGDDYSDVFLKAKKLYDAILLSGFLTVTDNETEAPLSSAMIKRYNEHKEDLALLKEYIRNISLKTYNEVFKDDTKNGYAGYIDGKTNQEDFYVYLKNLLAEFEGADYFLEKIDREDFLRKQRTFDNGSIPYQIHLQEMRAILDKQAKFYPFLAKNKERIEKILTFRIPYYVGPLARGNSDFAWSIRKRNEKITPWNFEDVIDKESSAEAFINRMTSFDLYLPEEKVLPKHSLLYETFNVYNELTKVRFIAESMRDYQFLDSKQKKDIVRLYFKDKRKVTDKDIIEYLHAIYGYDGIELKGIEKQFNSSLSTYHDLLNIINDKEFLDDSSNEAIIEEIIHTLTIFEDREMIKQRLSKFENIFDKSVLKKLSRRHYTGWGKLSAKLINGIRDEKSGNTILDYLIDDGISNRNFMQLIHDDALSFKKKIQKAQIIGDEDKGNIKEVVKSLPGSPAIKKGILQSIKIVDELVKVMGGRKPESIVVEMARENQYTNQGKSNSQQRLKRLEKSLKELGSKILKENIPAKLSKIDNNALQNDRLYLYYLQNGKDMYTGDDLDIDRLSNYDIDHIIPQAFLKDNSIDNKVLVSSASNRGKSDDFPSLEVVKKRKTFWYQLLKSKLISQRKFDNLTKAERGGLLPEDKAGFIQRQLVETRQITKHVARLLDEKFNNKKDENNRAVRTVKIITLKSTLVSQFRKDFELYKVREINDFHHAHDAYLNAVIASALLKKYPKLEPEFVYGDYPKYNSFRERKSATEKVYFYSNIMNIFKKSISLADGRVIERPLIEVNEETGESVWNKESDLATVRRVLSYPQVNVVKKVEEQNHGLDRGKPKGLFNANLSSKPKPNSNENLVGAKEYLDPKKYGGYAGISNSFAVLVKGTIEKGAKKKITNVLEFQGISILDRINYRKDKLNFLLEKGYKDIELIIELPKYSLFELSDGSRRMLASILSTNNKRGEIHKGNQIFLSQKFVKLLYHAKRISNTINENHRKYVENHKKEFEELFYYILEFNENYVGAKKNGKLLNSAFQSWQNHSIDELCSSFIGPTGSERKGLFELTSRGSAADFEFLGVKIPRYRDYTPSSLLKDATLIHQSVTGLYETRIDLAKLGEG

SEQ ID NO: 796 - protein, 595 aa, Streptococcus thermophilus
MVQFRKANSSIFGKGWHNFSVKLMMELIPELYETSEEQMTILKRLGKQKTTSSSNKTKYIDEKLLTEEIYNPVVAKSVRQAIKIVNAAIKEYGDFDNIVIEMARETNEDDEKKAIQKIQKANKDEKDAAMLKAANQYNGKAELPHSVFHGHKQLATKIRLWHQQGERCLYTGKTISIHDLINNPNQFEVDHILPLSITFDDSLANKVLVYATANQEKGQRTPYQALDSMDDAWSFRELKAFVRESKTLSNKKKEYLLTEEDISKFDVRKKFIERNLVDTRYASRVVLNALQEHFRAHKIDTKVSVVRGQFTSQLRRHWGIEKTRDTYHHHAVDALIIAASSQLNLWKKQKNTLVSYSEDQFLDIETGELISDDEYKESVFKAPYQHFVDTLKSKEFEDSILFSYQVDSKFNRKISDATIYATRKAKLDKEKKEYTYTLGKIKDIYTQAGYDAFIKIYKKDKSKFLMYHHDPQTFEKVIEPILENYPNKEINEKGKEVPCNPFLKYKEEHGYIRKYSKKGNGPEIKSFKYYDNLLGRHIDITPKNSKNIVALRKLNPWRTDVYFNHETMKYEFLGLKYADISYKKSKNKAGDFLPK

SEQ ID NO: 797 - protein, 1388 aa, Streptococcus thermophilus]
MTKPYSIGLDIGTNSVGWAVITDNYKVPSKKMKVLGNTSKKYIKKNLLGVLLFDSGITAEGRRLKRTARRRYTRRRNRILYLQEIFSTEMATLDDAFFQRLDDSFLVPDDKRDSKYPIFGNLVEEKVYHDEFPTIYHLRKYLADSTKKADLRLVYLALAHMIKYRGHFLIEGEFNSKNNDIQKNFQDFLDTYNAIFESDLSLENSKQLEEIVKDKISKLEKKDRILKLFPGEKNSGIFSEFLKLIVGNQADFRKCFNLDEKASLHFSKESYDEDLETLLGYIGDDYSDVFLKAKKLYDAILLSGFLTVTDNETEAPLSSAMIKRYNEHKEDLALLKEYIRNISLKTYNEVFKDDTKNGYAGYIDGKTNQEDFYVYLKNLLAEFEGADYFLEKIDREDFLRKQRTFDNGSIPYQIHLQEMRAILDKQAKFYPFLAKNKERIEKILTFRIPYYVGPLARGNSDFAWSIRKRNEKITPWNFEDVIDKESSAEAFINRMTSFDLYLPEEKVLPKHSLLYETFNVYNELTKVRFIAESMRDYQFLDSKQKKDIVRLYFKDKRKVTDKDIIEYLHAIYGYDGIELKGIEKQFNSSLSTYHDLLNIINDKEFLDDSSNEAIIEEIIHTLTIFEDREMIKQRLSKFENIFDKSVLKKLSRRHYTGWGKLSAKLINGIRDEKSGNTILDYLIDDGISNRNFMQLIHDDALSFKKKIQKAQIIGDEDKGNIKEVVKSLPGSPAIKKGILQSIKIVDELVKVMGGRKPESIVVEMARENQYTNQGKSNSQQRLKRLEKSLKELGSKILKENIPAKLSKIDNNALQNDRLYLYYLQNGKDMYTGDDLDIDRLSNYDIDHIIPQAFLKDNSIDNKVLVSSASNRGKSDDFPSLEVVKKRKTFWYQLLKSKLISQRKFDNLTKAERGGLLPEDKAGFIQRQLVETRQITKHVARLLDEKFNNKKDENNRAVRTVKIITLKSTLVSQFRKDFELYKVREINDFHHAHDAYLNAVIASALLKKYPKLEPEFVYGDYPKYNSFRERKSATEKVYFYSNIMNIFKKSISLADGRVIERPLIEVNEETGESVWNKESDLATVRRVLSYPQVNVVKKVEEQNHGLDRGKPKGLFNANLSSKPKPNSNENLVGAKEYLDPKKYGGYAGISNSFAVLVKGTIEKGAKKKITNVLEFQGISILDRINYRKDKLNFLLEKGYKDIELIIELPKYSLFELSDGSRRMLASILSTNNKRGEIHKGNQIFLSQKFVKLLYHAKRISNTINENHRKYVENHKKEFEELFYYILEFNENYVGAKKNGKLLNSAFQSWQNHSIDELCSSFIGPTGSERKGLFELTSRGSAADFEFLGVKIPRYRDYTPSSLLKDATLIHQSVTGLYETRIDLAKLGEG

SEQ ID NO: 798 - protein, 1038 aa, Streptococcus vestibularis
MIDELSNEELFIALKNMVKHRGISYLDDASDDGNSSVGDYAQIVKENSKQLETKTPGQIQLERYQKYGQLRGDFTVEEDGKKHRLINVFPTSAYRAEALRILQTQQEFNSQITDEFINRYLEILTGKRKYYHGPGNEKSRTDYGRYRTSGETLDNIFGILIGKCTFYPEEFRAAKASYTAQEFNLLNDLNNLTVPTETKKLSEEQKNQIINYVKNEKAMGPAKLFKYIAKLLSCDIADIKGYRIDKSDKAEIHTFEAYRKMKTLETIDIEKMSREELDKLAYVLTLNTEREGIQEALEHEFVDGNFSQEQIDELVQFRKANSSIFGKGWHNFSVKLMMELIPELYATSEEQMTILTRLGKQKTTSSSNKTKYIDEKLLTEEIYNPVVAKSVRQAIKIVNAAIKEYGDFDNIVIEMARATNEDDEKKAIQKIQKANKDEKDAAMLKAANQYNGKAELPHSVFHGHKQLATKIRLWHQQGERCLYTGKTISIHDLINNPNQFEIDHILPLSITFDDSLANKVLVYATANQEKGQRTPYQALDSMDDAWSFRELKAFVRESKTLSNKKKEYLLTEEDISKFDVRKKFIERNLVDTRYASRVVLNALQEHFRAHKIDTKVSVVRGQFTSQLRRHWGIEKTRDTYHHHAVDALIIAASSQLNLWKKQKNTLVNYSENQLLDIETGELISDDEYKESVFKAPYQHFVDTLKSKEFEDSILFSYQVDSKFNRKISDATIYATRKAKLDKEKKEYTYTLGKIKDIYALGTKTPSKTGFYKFLDLYKKNKSQFLMYQKDRKTWDEVIEKILEQYRPFKEKDKNGKEVDFNPFEKYRIENGPIRKYSRKGNGPEIKSLKYYDNLLGRFVDITPSESKNPVALLSLNPWRTDVYYNTETRKYEFLGLKYADLCFEKGGSYGISKVKYNKIREKEGIGKNSEFKFTLYKNDLILIKDTETNRQQVFRFWSRTGKDNPKRFEKHKIELKPYEKARFEKGEELEVLGKVPPSSNQLQKNMQIENLSIFKVRTDVLGNQHIIKNEGDKPKLDF

SEQ ID NO: 799 - protein, 97 aa, Streptococcus vestibularis
MSDLVLGLDIGIGSVGVGILNKVTGEIIHKNSRIFPAAQAENNVERRTNRQGRRLTRRKKHRRVRLNHLFEESGLITDFTKVSINLNPYQLRVKIDR

SEQ ID NO: 800 - protein, 1084 aa, Subdoligranulum sp.
MKNTLYGIGLDIGVASVGWAVVGLNGTGEPVGLHRLGVRIFDKAEQPKTGESLAAPRRMARGMRRRLRRKALRRADVYALLERSGLSTREELAQMFEAGGLEDIYALRTRALDEPVGKAEFSRILLHLAQRRGFKSNRRTASDGEDGRLLAAVNENRRRMAQGGWRTVGEMLYRHEAFALHKRNKADDYLSTVGRDMVAEEASILFERQRAMGCSWAAPELQAEYLSILLRQRSFDEGPGGNSPYGGNQVEKMVGRCTFEPDEPRAAKAAYSFEYFSLLQKLNHIRLAENGETRPLTQPQRQQLLSLAHKTPDISLARIRKELALPETVQFNGVRCRANETLEESEKKEKFACLPAYHKMRKALDGVVKGRISSLSISQRDAAATALSLYKNEDTLRAKLTEAGFQAPEIDALAGLTGFSKFGHLSLKACRKLIPHLEQGLTYDQACTAAGYDFKGHGAGERAFTLPAAAPEMEQITSPVVRRAVAQTIKVVNGIIREMDASPAWVRIELARELSKTFGERQEMDRSMRENAAQNERLMQELRDTFHLLSPTGQDLVKYRLWKEQDGVCAYSLRRLDVERLFEPGYVDVDHIVPYSLSFDDRRSNKVLVLSSENRQKGNRLPLQYLQGKRREDFIVWTNSSVHDYRKRQNLLREKLSGDEAEGFRQRNLQDTQHMARFLYNYISDHLAFAQSEALGKKRVFAVSGAVTSHLRKRWGLSKVRADGDLHHALDAAVVACTTDGMIRRISGYYGHIEGEYLQDADGAGSQHARTKERFPAPWPRFRDELIVRLSEQPAEPLLDINPEFYCEYGTEHIRPVFVSRMPRRKVTGPGHKETIKGAAAADEGLLTVRKALTELKLDKDGEIKDYYMPSSDTLLYEALKAQLRRFGGDGKKAFAEPFYKPKADGTPGPLVRKVKTTEKATLTVPVHGGAASNDTMVRVDVFLVPGDGYYWVPVYTADTLKPELPNRAVVQGKPYSEWKEMREEDFIFSLYPNDLVYVEHKSGLKFTLQNADSTLEKTRTQTSAFAYFVSGSISTASITIRTHDNAYGIPSLGVKTLKTFHKYQVDVLGNVFPVHKETRQKFR

SEQ ID NO: 801 - protein, 951 aa, Sutterella parvirubra
MPTVRPVFHSSASFDLGAKNTGLFLVNHPAGAAPSAEYAAAYTIVQPADGDGLNYSTTNRRAVRHRLRGGKRFKLARRLVLQVIDALRKLKPGLIRDEEMRRTVEALSSLLKRRGFTRIESEAQVDPTTLDSVDPAVFADHETLGGFFSLGIPISTQWDALSQNPGAVEQLFKALPSAKDFGKYVTEQFPEFAEQKKLYADAIKVLSSEAKSIVMQLGLGHHHRSKYFEMIAHDMLRDPRLQGVFELFGSEERFKTFICNVSNLQLRALRWYFDEPNPEVANQWNPEKFQVVWLRGLKYFHPDAERKADMKKLIDELTASKDILDALCTTDPRRTIPPYEDQNNRRPPFDQTLWLSAAELTRRYGDKWRIWSQKFERADRALSTGLDEILLYTDRRSRMFNRNQDPSVYADSYVLQRVLDRSSKLDRYALRALAAGYRTQELHEPLATLSDTLGTQHVETFLTFAAEYYEEVAAAKNGLWLDGPSRLLERADIHPPMKKKVLDLLLGNILDATPEIGRILRTVLWNRHVHEKSRSTPASLCRSIEAIRKDFGGEFRMRYDALDAKIRAAEDQKKKFKPTNAEEKDLFKAWNATKTMHAFLRDVLQLTPKQLERTASPYVFAQLHTLIDTERDGFTSTSLAAHLENHWRMRANAAGMAQCSRLPADAVRPFDGVLSKALDRQAFEAAKLAAQHLMSRKELTDTDIRYSIIIESNRFAFSASTAELKKNTLAKKNAEKGLNFELKRWQDKDSRIREASRGICAYTGAKLGDVVEYDHIIPRAFTTSAMGSVFNSEANLICVSRPGNQTKADKRYGLNKLHKTYLTAVFGTADVTTIAASIEDIVGKLASANRLRHFELLNEKEQDAVRHALFLDDESDARRIVLRELAAQNKSRVNGTQAWFVRAFMTKLLEITKDWRERTGNTLDIRSWKTDAEVASRLRSALNFHAEITLT

SEQ ID NO: 802 - protein, 406 aa, Sutterella parvirubra
SNLFREEVPYGDHFLPIIQMKNRIYIGYQLPKADGTGGNAVAVLGKDPLELLETLKPFLDREPQAFSDHPVTYKMINERAYELLTKCALTPDQTTELERTQAEVLRSLNYQTSRAAVLGRLVDDKNKFVAKDAVWKEKDFVISFKLSPKKSAFKASGQLELPAKSDWKALVDSPELAINWGQPADDTFSQRIERKVRMNSSHLEHTPKKRVVSLPVVDKPSGGFRIRRHNLDGSAVFQVHTVANNKYGGFSADSAGKVDWSTPVLCGHLQHANLVPLDPETASAEQLVRMSEWRVVETTSDIRLEVCPGTSGRRYVRVELPFTLLQEWLTAGKVADVPVSPLHLPGSIKLTDPKTFCAEAQKTLSIFAQPRATIFFEQLGDRVRFRFEASGGPATMNAAYNAAGRS

SEQ ID NO: 803 - protein, 389 aa, Sutterella wadsworthensis
MKACDLEEKTNHLQACVAIDLGARYTGTFSILHKSSHLPSKDDCRAATYVLPEDGGKMTYSQRNRTAVRHRIRGKKRFALARRMAMLIIREKLAAKSVTLTSSETRRLAEAVGSLLRRRGYNRLETETDNDLTVLENIEPEVFSEHEILGKYFYAGTDLAIQWETLSQDLSKISSLLAERLSEKDFKKYLTGLIPDDKNKIKHIISVFKMLIDEAESINMQCVLGHKHRTQYLSDIHADMHRDTRLSKAAEAFGGVDRLWRLLGNLSNLQLRAHRWYFNAPHLFDDQALEPARLQKTLVRAFKYLHCPQGVESRAQAELVKELEEADDIIDALCTIDPVRTIPPYENQQNRRPPFDQTLYLSPDLGVSGFLCLGRLFQGQPNEAALCFL

SEQ ID NO: 804 - protein, 976 aa, Tannerella sp.
MKKILGLDLGSNSIGWALVNEAENRDEASSIIKLGVRVNPLTVDEMQNFEKGKSITTNADRTLKRSMRRNLQRYKLRRDALIKLLKKVGFITDGTILSEQGNRTTFETYRLRAKAPDEEISLQELARVLLMINKKRGYKSSRKIKEKEAGTLIDGMEVAKKLYDEDLTPGQLCLQLLESGKKSLPDFYSSDLQEEFDRIWNFQKQFNPKAFCDTAKEEIKGKNKSQTWAILAKYFIWMEEMDVWNEKESKTERVEKECKLVGLKRTVKKEEQRKENYCWRVQALTEQLDLEKVAVVLQEINGQISTSSGYLGAISDRSKVLYFNRQTVGQYQMAELEKNPNTSLRNMVFYRQDYLDEFDKIWEKQAEFHKELTVELKKEIRDIIIFYQRRLKSQKGLIGFCEFENREIMVEKNGKMQAKVVGCKVIPRSHPLFQEFKIWQTLNNVEVFAGEKKCKRKRTDAFPGLFDGTEDTLMVEGWRYLYQEEKEILAKELSVKKSLKKEYILKLLFDNPQDLDMNFEQIEGNDTGNVLFSAYSKMIEKYGYEPLDFGKPTDKIIEQLQVIFADLGWNTDLLFVDLNKEGKDLEKQPYFKLWHLLYSFEGDNTPTGNGKLVEKLMELCHVGKECALELVNISFQNDYGSLSAKAIKKILPYLKEGNRYDVACGYAGYRHSKSSLTKEEIENKVLKDKLDILPKNSLRNPVVEKILNQMVNVINAIIDTYGKPDEIRVELARELKKSAKEREELTKAIAKSTREHEEIRKVLQEEFGMINVSRNDIIRYKLYKELKDNGYKTLYSNQDIPKEKVFSKEIDIEHIIPQARLFDDSLSNKTLEYKAINIEKGNKTAYDFVKEKYGEKGLQQYLNRCESLFKGHRTKLRKLKMGQENIPEGFIDRDLRNTQYIAKKALAMLNEICRRVVATTGSITDRLREDWQLVDVLKELRCFRYFKDTKMKANHNKNIFYTSIKVDVSDTSKILK

SEQ ID NO: 805 - protein, 1049 aa, Tistrella mobilis
MINERLTFGIDLGIGSCGWAVLRHADAAGEPGVIEGLGSWCFDVPETSKERIPTNQVRRSNRLLRRVIRRRRNRMAEIRRLFHAQGLLPSADEDALKRPRLDPWELRARGLDQCLSAEEFAVALGHIARHRGFRSSAKRKAANTSGEDSKMLSALLVTRERTARYRTVGEMFARDPEYSARRRNRDGIFDRTVARDDLIHEVGKLFEAQRARGSAFASPDLEADFNAIAFRQAEMQDSERLVGNCPFERDEKRAARWAPSFERFRLLTRLINLRIATAEGERRFTPEDLARVSAELGATAKLPVSRVRALIGLLPDERFTTIRVEDEDRDIVARTGEAAPGTWRLRKTLGEALWAEMQARPDQLDAIAHVLSFFEATAKIRSELDRLGLPAAVIEALDRGLEDGAFAKFKGAGHISAKACRNLLPHLQQGHRYDQACRLAGYDHAASTLSHTAQVVSKAGFNALVTELGESIANPIARKALTEGLKQIRAMCARWGLPGAIHIELAREVGNSIEKRRELESQRETTTKRRQTERDEIRGLLALEDVDDDTLLRYRLWKEQGGKCLYTGKDIHVRQLIATDNSVQVDHILPWSRFGDDSFNNKTLCLASANQRKRGQTPWEWFSLTGTPEAWEVFASRVETSKDLRGFKKRNLLLKNADEVAQRFRSRNLNDTRYAARLLAEAAKLFYPAGDRQEKDGRRRVLTRPGPLTAALRHAWGLESLKKADGKRVSDDRHHALDALAVAAISEREVQRLTRSFQEWEQQGLARPLRHVAPPWPGFRGDVLAAYAQAFVARPERRRARGKGHDASIRQVVGEGPEAQVFERRGLADLKEADLDRVKDPERNQAIIEAVRAWILAGRPADAPPRSPRGDVIVKLRTAPAKKIKPAVPVRGGTADRGDMVRIDVFTRPNRKGRDEWYLVPIYPHQVMNRKAWPHPPMRSVVAYKDEAGWTEIGAEHSFRFSLYPRSYVQLVKSNGDVIEGYLVSMDRSTGAFRVFVHNNPAEMAKGIGAKTLLNLRKFNVDRFGVRTEVKSEVRTWHGEVCTSPVPPD

SEQ ID NO: 806 - protein, 1395 aa, Treponema denticola
MKKEIKDYFLGLDVGTGSVGWAVTDTDYKLLKANRKDLWGMRCFETAETAEVRRLHRGARRRIERRKKRIKLLQELFSQEIAKIDEGFFQRMKESPFYAEDKTILQENALFNDKDFTDKTYHKAYPTINHLIKAWIENKVKPDPRLLYLACHNIIKKRGHFLFEGDFDSENQFDTSIQALFEYLREDMEVDIDADSQKVKEILKDSSLKNSEKQSRLNKILGLKPSDKQKKAITNLISGNKINFADLYDNPDLKDAEKNSISFSKDDFDALSDDLASILGDSFELLLKAKAVYNCSVLSKVIGDEQYLSFAKVKIYEKHKTDLTKLKAVIKKHFPNNYKKVFGYNQDNESKNNYSGYVGVCKTKNKKLVINNSVNQEDFYKFLKPILSAKSEIKEVNDILAEIETGNFLPKQISKSNAEIPYQLRKMELEKILSNAEKHFSFLKQKDEKGLSHSEKIIMLLTFKIPYYIGPINDNHKKSFPDRCWVVKKEKSPSGKTTPWNFFDHIDKEKTAEEFITSRTNFCTYLIGESVLPKNSLLYSEYTVLNEINNLQIIIDGKNICDTKLKQKIYEDLFKKYKKITQKQISTFIKHEGICNKTDEVIILGIDKECTSSLKSYIELKNIFGKQVDEISTKNMLEEIIRWATIYDEGEGKTILKTKIKAEYGKYCSDEQIKKILNLKFSGWGRLSRKFLETVTSEMPGFSEPVNIITAMRETQNNLMELLSSEFKFTENIKKINSGFEDAEKQFSYDGLVKPLFLSPSVKKMLWQTLKLVKEISHITQAPPKKIFIEMAKGAELEPARTKTRLKILQDLYSSCKNDADAFSSEIQYLSGKIENEDNLRLRSDKLYLYYTQLGKCMYCGKPIEIGHVFDTSNYDIDHIYPQSKIKDDSISNRVLVCSSCNKNKEDKYPLKSEIQSKQRGFWNFLQRNNFISLEKLNRLTRTTPISDDETAKFIARQLVETRQATKVAAKVLEKMFPETKIVYSKAETVSMFRNKFDIIKCREINDFHHAHDAYLNIVVGNVYNTKFTNNPWNFIKEKRDNPKIADTYNYYKVFDYDVKRNNITAWEKGKTIITVKDMLKRNTPIYTRQAACKKGGLFDQTIMKKGLGQHPLKKEGPFSNISKYGGYNKVSAAYYTLIEYEEKGNKIRSLETIPLYLVKDIQKDQDVLKSYLTDLLGKKEFKILVPKIKINSLLKINGFPCHITGKTNDSFLLRPAVQFCCSNDEVLYFKKIIRFSEIRSQREKIGKTISPYEDLSFRSYIKENLCKKTKNDEIGEKEFYDLLQKKNLEIYDMLLTKHKDTIYKKRPNSATIDILVKGKEKFKSLIIENQFEVILEILKLFSATRNVSELQHIGGSKYSGVAKIGNKISSLDNCILIYQSITGIFEKRIDLLKV

SEQ ID NO: 807 - protein, 769 aa, Treponema denticola
MKKEIKDYFLGLDVGTGSVGWAVTDTDYKLLKANRKDLWGMRCFETAETAEVRRLHRGARRRIERRKKRIKLLQELFSQEIAKIDEGFFQRMKESPFYAEDKTILQENALFNDKDFTDKTYHKAYPTINHLIKAWIENKVKPDPRLLYLACHNIIKKRGHFLFEGDFDSENQFDTSIQALFEYLREDMEVDIDADSQKVKEILKDSSLKNSEKQSRLNKILGLKPSDKQKKAITNLISGNKINFADLYDNPDLKDAEKNSISFSKDDFDALSDDLASILGDSFELLLKAKAVYNCSVLSKVIGDEQYLSFAKVKIYEKHKTDLTKLKAVIKKHFPNNYKKVFGYNQDNESKNNYSGYVGVCKTKNKKLVINNSVNQEDFYKFLKPILSAKSEIKEVNDILAEIETGNFLPKQISKSNAEIPYQLRKMELEKILSNAEKHFSFLKQKDEKGLSHSEKIIMLLTFKIPYYIGPINDNHKKSFPDRCWVVKKEKSPSGKTTPWNFFDHIDKEKTAEEFITSRTNFCTYLIGESVLPKNSLLYSEYTVLNEINNLQIIIDGKNICDTKLKQKIYEDLFKKYKKITQKQISTFIKHEGICNKTDEVIILGIDKECTSSLKSYIELKNIFGKQVDEISTKNMLEEIIRWATIYDEGEGKTILKTKIKAEYGKYCSDEQIKKILNLKFSGWGRLSRKFLETVTSEMPGFSEPVNIITAMRETQNNLMELLSSEFKFTENIKKINSGFEDAEKQFSYDGLVKPLFLSPSVKKCCGRL

SEQ ID NO: 808 - protein, 1395 aa, Treponema denticola
MKKEIKDYFLGLDVGTGSVGWAVTDTDYKLLKANRKDLWGMRCFETAETAEVRRLHRGARRRIERRKKRIKLLQELFSQEIAKIDEGFFQRMKESPFYAEDKTILQENALFNDKDFTDKTYHKAYPTINHLIKAWIENKVKPDPRLLYLACHNIIKKRGHFLFEGDFDSENQFDTSIQALFEYLREDMEVDIDADSQKVKEILKDSSLKNSEKQSRLNKILGLKPSDKQKKAITNLISGNKINFADLYDNPDLKDAEKNSISFSKDDFDALSDDLASILGDSFELLLKAKAVYNCSVLSKVIGDEQYLSFAKVKIYEKHKTDLTKLKAVIKKHFPNNYKKVFGYNQDNESKNNYSGYVGVCKTKNKKLVINNSVNQEDFYKFLKPILSAKSEIKEVNDILAEIETGNFLPKQISKSNAEIPYQLRKMELEKILSNAEKHFSFLKQKDEKGLSHSEKIIMLLTFKIPYYIGPINDNHKKSFPDRCWVVKKEKSPSGKTTPWNFFDHIDKEKTAEEFITSRTNFCTYLIGESVLPKNSLLYSEYTVLNEINNLQIIIDGKNICDTKLKQKIYEDLFKKYKKITQKQISTFIKHEGICNKTDEVIILGIDKECTSSLKSYIELKNIFGKQVDEISTKNMLEEIIRWATIYDEGEGKTILKTKIKAEYGKYCSDEQIKKILNLKFSGWGRLSRKFLETVTSEMPGFSEPVNIITAMRETQNNLMELLSSEFKFTENIKKINSGFEDAEKQFSYDGLVKPLFLSPSVKKMLWQTLKLVKEISHITQAPPKKIFIEMAKGAELEPARTKTRLKILQDLYSSCKNDADAFSSEIQYLSGKIENEDNLRLRSDKLYLYYTQLGKCMYCGKPIEIGHVFDTSNYDIDHIYPQSKIKDDSISNRVLVCSSCNKNKEDKYPLKSEIQSKQRGFWNFLQRNNFISLEKLNRLTRTTPISDDETAKFIARQLVETRQATKVAAKVLEKMFPETKIVYSKAETVSMFRNKFDIIKCREINDFHHAHDAYLNIVVGNVYNTKFTNNPWNFIKEKRDNPKIADTYNYYKVFDYDVKRNNITAWEKGKTIITVKDMLKRNTPIYTRQAACKKGELFNQTIMKKGLGQHPLKKEGPFSNISKYGGYNKVSAAYYTLIEYEEKVNKIRSLETIPLYLVKDIQKDQDVLKSYLTDLLGKKEIKILVPKIKINSLLKINGFPCHITGKTGDSFVLRPAVQFCCSNDEVLYFKKIIRFNEIRSQREKMGKTISPYEDLSFRSYIKENLCKKTKADEIGEKEFYDLLQKKNLEIYDMLLTKHKDTIYNKRPNSTTLGMLTKGRYEFINLKPKDQIIVMLEILKLFCTTREAIDLGLIKGKPAAGVATLGKKISNLDNCILIYQSITGIFEKRIDLLKV

SEQ ID NO: 809 - protein, 1395 aa, Treponema denticola
MKKEIKDYFLGLDVGTGSVGWAVTDTDYKLLKANRKDLWGMRCFETAETAEVRRLHRGARRRIERRKKRIKLLQELFSQEIAKIDEGFFQRMKESPFYAEDKTILQENTLFNDKDFTDKTYHKAYPTINHLIKAWIENKVKPDPRLLYLACHNIIKKRGHFLFEGDFDSENQFDTSIQALFEYLREDMEVDIDADSQKVKEILKDSSLKNSEKQSRLNKILGLKPSDKQKKAITNLISGNKINFADLYDNPDLKDAEKNSISFSKDDFDALSDDLASILGDSFELLLKAKAVYNCSVLSKVIGDEQYLSFAKVKIYEKHKTDLTKLKNVIKKHFPKDYKKVFGYNKNEKNNNNYSGYVGVCKTKSKKLIINNSVNQEDFYKFLKTILSAKSEIKEVNDILTEIETGTFLPKQISKSNAEIPYQLRKMELEKILSNAEKHFSFLKQKDEKGLSHSEKIIMLLTFKIPYYIGPINDNHKKSFPDRCWVIKKEKSPSGKTTPWNFFDHIDKDKTAEAFITSRTNFCTYLVGESVLPKSSLLYSEYTVLNEINNLQIIIDGKNICDIKLKQKIYEELFKKYKKITQKQISTFIKHEGICNKTDEVIILGIDKECTSSLKSYIELKNIFGKQVDEISTKNMLEEIIRWATIYDEGEGKTILKTKIKAEYGKYCSDEQIKKILNLKFSGWGRLSRKFLETVTSEMPGFSEPVNIITAMRETQNNLMELLSSEFKFTENIKKINSGFEDAEKQFSYNGLVKPLFLSPSVKKMLWQTLKLVKEISHITQAPPKKIFIEMAKGAELEPARTKTRLKILQDLYNNCKNDADAFSSEIKDLSGKIENEDNLRLRSDKLYLYYTQLGKCMYCGKPIEIGHVFDTSNYDIDHIYPQSKIKDDSISNRVLVCSSCNKNKEDKYPLKSEIQSKQRGFWNFLQRNNFISLEKLNRLTRTTPISDDETAKFIARQLVETRQATKVAAKVLEKMFPETKIVYSKAETVSMFRNKFDIIKCREINDFHHAHDAYLNIVVGNVYNTKFTNNPWNFIKEKRDNPKIADTYNYYKVFDYDVKRNNITAWEKGKTIITVKDMLKRNTPIYTRQAACKKGGLFDQTIMKKGLGQHPLKKEGAFSNISKYGGYNKVSAAYYTLIEYEEKGNKIRSLETIPLYLVKDIQKDQDVLKSYLTDLLGKKEIKILVPKIKINSLLKINGFPCHITGKTGDSFVLRPAVQFCCSNDEVLYFKKIIRFNEIRSQREKMGKTISPYEDLSFRSYIKENLCKKTKADEIGEKEFYDLLQKKNLEIYDMLLTKHKDTIYNKRPNSTTLGMLTKGRYEFINLKPKDQIIVMLEILKLFCTTREAIDLGLIKGKPAAGVATLGKKISNPDNCILIYQSITGIFEKRIDLLKV

SEQ ID NO: 810 - protein, 1395 aa, Treponema denticola
MKKEIKDYFLGLDVGTGSVGWAVTDTDYKLLKANRKDLWGMRCFETAETAEVRRLHRGARRRIERRKKRIKLLQELFSQEIAKIDEGFFQRMKESPLYAEDKTILQENTLFNDKDFTDKTYHKAYPTINHLIKAWIENKVKPDPRLLYLACHNIIKKRGHFLFEGDFDSENQFDTSIQALFEYLREDMELDIDADSQKVKEILKDSSLKNSEKQSRLNKMLGLKPSDKQKKAITNLISGNKINFADLYDNPDLKDAEKNSISFSKDDFDALSDDLASILGDSFELLLKAKAVYNCSVLSKVIGDEQYLSFAKVKIYEKHKTDLTKLKNVIKKHFPKDYKKVFGYNKNEKNNNNYSAYVGVCKITHKKLVIKNSASQEDFYKFLKTILSAKSEIKEVNDILTEIETGTFLPKQISKSNAEIPYQLRKMELEKILSNAEKHFSFLKQKDEKGLSHSEKIIMLLTFKIPYYIGPINDNHKKSFPDRCWVVKKEKSPSGKTTPWNFFDHIDKEKTAEEFITSRTNFCTYLIGESVLPKSSLLYSEYTVLNEINNLQIIIDGKNICDIKLKQKIYEELFKKYKKITQKQISTFIKHEGICNKTDEVIILGIDKECTSSLKSYIELKNIFGKQVDEISTKNMLEEIIRWATIYDEGEGKTILKTKIKAEYGKYCSDEQIKKILNLKFSGWGRLSRKFLETVTSEMPGFSEPVNIITAMRETQNNLMELLSSEFKFTENIKKINSGFEDAEKQFSYNGLVKPLFLSPSVKKMLWQTLKLVKEISHITQAPPKKIFIEMAKGAELEPARTKTRLKILQDLYSSCKNDADAFSSEIQYLSGKIENEDNLRLRSDKLYLYYTQLGKCMYCGKPIEIGHVFDTSNYDIDHIYPQSKIKDDSISNRVLVCSSCNKNKEDKYPLKAEIQSKQRGFWNFLQRNNFISLEKLNRLTRTSPISDDETAKFIARQLVETRQATKVAAKVLEKMFPETKIVYSKAETVSMFRNKFDIIKCREINDFHHAHDAYLNIVVGNVYNTKFTNNPWNFIKEKRDNPKIADTYNYYKVFDYDVKRNNITAWEKGKTIITVKDMLKRNTPIYTRQAACKKGELFNQTIMKKGLGQHPLKKEGPLSNISKYGGYNKVSAAYYTLIEYEEKGSKIRSLETIPLYLVKDIQKNKDGLKSYLTDQIGKKEIKILIPKIKINSLLKINGFPCHITGKMGEAFVLRPAVQFCCSNDEALYFKKIIRFNEIRKQREKMGKTISPYEDLSFRSYIKDNLCKKTKADEIEEKEFYDLLQKKNLEIYDMLLTKHKDTIYKKRPNSATIDILVKGKEKFKSLIIENQFEVILEILKLFSATRNVSDLQHIGGSKNAGNARVGNKISSLDNCILIYQSITGIFEKRIDLLKI

SEQ ID NO: 811 - protein, 1395 aa, Treponema denticola
MKKEIKDYFLGLDVGTGSVGWAVTDTDYKLLKANRKDLWGMRCFETAETAEVRRLHRGARRRIERRKKRIKLLQELFSQEIAKIDEGFFQRMKESPLYAEDKTILQENTLFNDKDFTDKTYHKAYPTINHLIKAWIENKVKPDPRLLYLACHNIIKKRGHFLFEGDFDSENQFDTSIQALFEYLREDMEVDIDADSQKVKEILKDSSLKNSEKQSRLNKMLGLKPSDKQKKAITNLISGNKINFADLYDNPDLKDAEKNSISFSKDDFDALSDDLASILGDSFELLLKAKAVYNCSVLSKVIGDEQYLSFAKVKIYEKHKTDLTKLKNVIKKHFPKDYKKVFGYNKNEKNNNNYSGYVGVCKTKSKKLIINNSVNQEDFYKFLKTILSAKSEIKEVNDILTEIETGTFLPKQISKSNAEIPYQLRKMELEKILSNAEKHFSFLKQKDEKGLSHSEKIIMLLTFKIPYYIGPINDNHKKSFPDRCWVVKKEKSPSGKTTPWNFFDHIDKEKTAEEFITSRTNFCTYLIGESVLPKNSLLYSEYTVLNEINNLQIIIDGKNICDTKLKQKIYEELFKKYKKITQKQISTFIKHEGICNKTDEVIILGIDKECTSSLKSYIELKNIFGKQVDEISTKNMLEEIIRWATIYDEGEGKTILKTKIKAEYGKYCSDEQIKKILNLKFSGWGRLSRKFLETVTSEMPGFSEPVNIITAMRETQNNLMELLSSEFKFTENIKKINSGFEDVEKQFSYDGLVKPLFLSPSVKKMLWQTLKLVKEISHITQAPPKKIFIEMAKGAELDPVRTKTRLKILQDLYNNCKNDADAFSSEIKDLSGKIENEDNLRLRSDKLYLYYTQLGKCMYCGKPIEIGHVFDTSNYDIDHIYPQSKIKDDSISNRVLVCSSCNKNKEDKYPLKAEIQSKQRGFWNFLQRNNFISLEKFNRLTRATPISDDETAKFIARQLVETRQATKVAARVLEKMFPETKIVYSKAETVSMFRNKFDIVKCREINDFHHAHDAYLNIVVGNVYNTKFTNNLWNFIKEKRDNPKIADTYNYYKVFDYDVKRNNITAWEKGKTIITVKDMLKRNTPIYTRQAACKKGGLFDQTIMKKGLGQHPLKKEGPFSNISKYGGYNKVSAAYYTLIEYEEKGNKIRSLETIPLYLVKDIQKDQDVLKSYLTDLLGKKEFKILVPKIKINSLLKINGFPCHITGKTNDSFLLRPAVQFCCSNDEVLYFKKIIRFSEIRSQREKIGKTISPYEDLSFRSYIKENLCKKTKNDEIGEKEFYDLLQKKNLEIYDMLLTKHKDTIYKKRPNSATIDILVKGKEKFKSLIIENQFEVILEILKLFSATRNVSDLQHIGGSKYSGVAKIGNKISSLDNCILIYQSITGIFEKRIDLLKV

SEQ ID NO: 812 - protein, 357 aa, Treponema denticola
MKKEIKDYFLGLDVGTGSVGWAVTDTDYKLLKANRKDLWGMRCFETAETAEVRRLHRGARRRIERRKKRIKLLQELFSQEIAKTDEGFFQRMKESPFYAEDKTILQENALFNDRDFTDKTYHKAYPTINHLIKAWIENKVKPDPRLLYLACHNIIKKRGHFLFEGDFDSENQFDTSIQAFFEYLREDMEVDIDADSQKIKEILKDSSLKNSEKQSRLNKILGLKSSDKQKKAITNLISGNKINFADLYDNPDLKDAEKNSISFSKDDFDALSDDLASILGDSFELLLKAKAVYNCSVLSKVIGDEQYLSFAKVKIYEKHKTDLTKLKNVIKKHFPKDYKKVFGYNKNEKITTITPDM

SEQ ID NO: 813 - protein, 1395 aa, Treponema denticola
MKKEIKDYFLGLDVGTGSVGWAVTDTDYKLLKANRKDLWGMRCFETAETAEVRRLHRGARRRIERRKKRIKLLQELFSQEIAKTDEGFFQRMKESPFYAEDKTILQENALFNDRDFTDKTYHKAYPTINHLIKAWIENKVKPDPRLLYLACHNIIKKRGHFLFEGDFDSENQFDTSIQALFEYLREDMEVDIDADSQKVKEILKDSSLKNSEKQSRLNKMLGLKPSDKQKKAITNLISGNKINFADLYDNPDLKDAEKNSISFSKDDFDALSDDLASILGDSFELLLKAKAVYNCSVLSKVIGDEQYLSFAKVKIYEKHKTDLTKLKNVIKKHFPNDYKKVFGYNKNEKNNNNYSAYVGVCKTKSKKLVINNTVNQEDFYKFLKPILLAKSEIKEVNDILTEIETGTFLPKQISKSNAEIPYQLRKMELEKILSNAEKHFSFLKQKDEKGLSHSEKIIMLLTFKIPYYIGPINDNHKKSFPDRCWVIKKEKSPSGKTTPWNFFDHIDKDKTAEAFITSRTNFCTYLVGESVLPKNSLLYSEYTVLNEINNLQIIIDGKNICDIKLKQKIYEELFKKYKKITQKQISTFIKHEGICNKTDEVIILGIDKECTSSLKSYIELKNIFGKQVDEISTKNMLEEIIRWATIYDEGEGKTILKTKIKAEYGKYCSDEQIKKILNLKFSGWGRLSRKFLETVTSEMPGFSEPVNIITAMRETQNNLMELLSSEFKFTENIKKINSGFEDVEKQFSYDSLVKPLFLSPSVKKMLWQTLKLVKEISHITQAPPKKIFIEMAKGAELDPVRTKTRLKILQDLYNNCKNDADAFSSEIKDLSGKIENEDNLRLRSDKLYLYYTQLGKCMYCGKPIEIGHVFDTSNYDIDHIYPQSKIKDDSISNRVLVCSSCNKNKEDKYPLKAEIQSKQRGFWNFLQRNNFISLEKLNRLTRTSPISDDETAKFIARQLVETRQATKVAAKVLEKMFPETKIVYSKAETVSMFRNKFDIIKCREINDFHHAHDAYLNIVVGNVYNTKFTNNPWNFIKEKRDNPKIADTYNYYKVFDYDVKRNNITAWEKGKTIITVKDMLKRNTPIYTRQAACKKGELFNQTIMKKGLGQHPLKKEGPLSNISKYGGYNKVSAAYYTLIEYEEKGSKIRSLETIPLYLVKDIQKNKDGLKSYLTDQIGKKEIKILIPKIKINSLLKINGFPCHITGKMGEAFVLRPAVQFCCSNDEALYFKKIIRFNEIRKQREKMGKTISPYEDLSFRSYIKDNLCKKTKADEIEEKEFYDLLQKKNLEIYDMLLTKHKDTIYKKRPNSATIDILVKGKEKFKSLIIENQFEVILEILKLFSATRNVSDLQHIGGSKNAGNARVGNKISSLDNCILIYQSITGIFEKRIDLLKI

SEQ ID NO: 814 - protein, 631 aa, Treponema denticola
MLWQTLKLVKEISHITQAPPKKIFIEMAKGAELEPARTKTRLKILQDLYNNCKNDADAFSSEIKDLSGKIENEDNLRLRSDKLYLYYTQLGKCMYCGKPIEIGHVFDTSNYDIDHIYPQSKIKDDSISNRVLVCSSCNKNKEDKYPLRSEIQSKQRGFWNFLQRNNFISLEKLNRLTRTTPISDDETAKFIARQLVETRQATKVAAKVLEKMFPETKIVYSKAETVSMFRNKFDIVKCREINDFHHAHDAYLNIVVGNIYNTKFTNNPWNFIKEKRDNPKIADTYNYYKVFDYDVKRNNITAWEKGKTIITVKDMLKRNTPIYTRQAACKKGGLFDQTIMKKGLGQHPLKKEGPFSNISKYGGYNKVSAAYYTLIEYEEKENKIRSLETIPLYLVKDIQKSQEKLKSYLTDLLGKKEIKILVPKIKINSLLKINGFPCHITGKTNDSFLLRPAVQFCCSNDEVLYFKKIIRFNEIRSQREKMGKTISPYEDLSFRSYIKENLCKKTKNDEIGEKEFYDLLQKKNLEIYDMLLTKHKDTIYNKRPNSTTLGMLTKGRYEFINLKPKDQIIVMLEILKLFCTTREAIDLGLIKGKPAAGVATLGKKISNLDNCILIYQSITGIFEKRIDLLKV

SEQ ID NO: 815 - protein, 631 aa, Treponema denticola
MLWQTLKLVKEISHITQAPPKKIFIEMAKGAELEPARTKTRLKILQDLYSSCKNDADAFSSEIQYLSGKIENEDNLRLRSDKLYLYYTQLGKCMYCGKPIEIGHVFDTSNYDIDHIYPQSKIKDDSISNRVLVCSSCNKNKEDKYPLKSEIQSKQRGFWNFLQRNNFISLEKLNRLTRTTPISDDETAKFIARQLVETRQATKVAAKVLEKMFPETKIVYSKAETVSMFRNKFDIIKCREINDFHHAHDAYLNIVVGNVYNTKFTNNPWNFIKEKRDNPKIADTYNYYKVFDYDVKRNNITAWEKGKTIITVKDMLKRNTPIYTRQAACKKGELFNQTIMKKGLGQHPLKKEGPFSNISKYGGYNKVSAAYYTLIEYEEKVNKIRSLETIPLYLVKDIQKDQDVLKSYLTDLLGKKEIKILVPKIKINSLLKINGFPCHITGKTGDSFVLRPAVQFCCSNDEVLYFKKIIRFNEIRSQREKMGKTISPYEDLSFRSYIKENLCKKTKADEIGEKEFYDLLQKKNLEIYDMLLTKHKDTIYNKRPNSTTLGMLTKGRYEFINLKPKDQIIVMLEILKLFCTTREAIDLGLIKGKPAAGVATLGKKISNLDNCILIYQSITGIFEKRIDLLKV

SEQ ID NO: 816 - protein, 370 aa, Treponema denticola
MTEIETGTFLPKQISKSNAEIPYQLRKMELEKILSNAEKHFSFLKQKDEKGLSHSEKIIMLLTFKIPYYIGPINDNHKKSFPDRCWVVKKEKSPSGKTTPWNFFDHIDKEKTAEEFITSRTNFCTYLVGESVLPKSSLLYSEYTVLNEINNLQIIIDGKNICDIKLKQKIYEELFKKYKKITQKQISTFIKHEGICNKTDEVIILGIDKECTSSLKSYIELKNIFGKQVDEISTKNMLEDIIRWAAIYDEGEGKTILKTKIKAEYGKYCSDEQIKKILNLKFSGWGRLSRKFLETVTSEMPGFSEPVNIITAMRETQNNLMELLSSEFKFTENIKKINSGFEDVEKQFSYDGLVKPLFLSPSVKKCCGRL

SEQ ID NO: 817 - protein, 591 aa, Treponema phagedenis
MARGKEAEKGRTSSRYASIKALYENCKQDLADYDAVLEQFKSEEPLRLRSDKLYLYYTQLGRCMYTGRVIDIDRLMSDNSAYDIDHIYPRSKIKDDSLTNRVLVVKDANQDKRDEPLSPQIQDKQKGFWDFLKHNNFISIEKYERLTYRGYFTEEMLSGFIARQLVETRQGTKTAGQILEQLYPDSTVVYCKAANTSEFRQKFNLIKCREINDLHHAHDAYLNIAVGNVYYTKFTSNPRNFMKLKEPYNLRELFDRDVERNNTIAWVKNKTITTIKDMLKRNTPLYTRYAYCKTGGFFDQNIMKKGKGQFPLKENSPLSDISKYGGYNKVSGAYFILVQKKEKDAVVRILETVPLYLLNKPGKESENVREYLSTALGTKDFKILIPKIKINSLFKINGFLVHITGKTNDRFLVRSAVQFFCDDNLTLFFKRIIAFNGLRNLNKDKSMTAYDDNTMRVYVRGNLFKDKNQLFDKNKFNEIVKGKNISVYKDMVKRYETSIYKFRPNTAVIPILKSGEDKFINLPIEEQFKILQEILKLFGAINGTANLTLIGGRPSTGEMKISNNISNLKQCILIHQSPTGVFEQQIDLLKI

SEQ ID NO: 818 - protein, 1062 aa, Treponema sp.
MIMKLEKWRLGLDLGTNSIGWSVFSLDKDNSVQDLIDMGVRIFSDGRDPKTKEPLAVARRTARSQRKLIYRRKLRRKQVFKFLQEQGLFPKTKEECMTLKSLNPYELRIKALDEKLEPYELGRALFNLAVRRGFKSNRKDGSREEVSEKKSPDEIKTQADMQTHLEKAIKENGCRTITEFLYKNQGENGGIRFAPGRMTYYPTRKMYEEEFNLIRSKQEKYYPQVDWDDIYKAIFYQRPLKPQQRGYCIYENDKERTFKAMPCSQKLRILQDIGNLAYYEGGSKKRVELNDNQDKVLYELLNSKDKVTFDQMRKALCLADSNSFNLEENRDFLIGNPTAVKMRSKNRFGKLWDEIPLEEQDLIIETIITADEDDAVYEVIKKYDLTQEQRDFIVKNTILQSGTSMLCKEVSEKLVKRLEEIADLKYHEAVESLGYKFADQTVEKYDLLPYYGKVLPGSTMEIDLSAPETNPEKHYGKISNPTVHVALNQTRVVVNALIKEYGKPSQIAIELSRDLKNNVEKKAEIARKQNQRAKENIAINDTISALYHTAFPGKSFYPNRNDRMKYRLWSELGLGNKCIYCGKGISGAELFTKEIEIEHILPFSRTLLDAESNLTVAHSSCNAFKAERSPFEAFGTNPSGYSWQEIIQRANQLKNTSKKNKFSPNAMDSFEKDSSFIARQLSDNQYIAKAALRYLKCLVENPSDVWTTNGSMTKLLRDKWEMDSILCRKFTEKEVALLGLKPEQIGNYKKNRFDHRHHAIDAVVIGLTDRSMVQKLATKNSHKGNRIEIPEFPILRSDLIEKVKNIVVSFKPDHGAEGKLSKETLLGKIKLHGKETFVCRENIVSLSEKNLDDIVDEKIKSKVKDYVAKHKGQKIEAVLSDFSKENGIKKVRCVNRVQTPIEITSGKISRYLSPEDYFAAVIWEIPGEKKTFKAQYIRRNEVEKNSKGLNVVKPAVLENGKPHPAAKQVCLLHKDDYLEFSDKGKMYFCRIAGYAATNNKLDIRPVYAVSYCADWINSTNETMLTGYWKPTPTQNWVSVNVLFDKQKARLVTVSPIGRVFRK

SEQ ID NO: 819 - protein, 281 aa, Treponema vincentii
MKTLGLDIGTNSIGWGIVDETANKIEDCGVYIFPEGVKKEKGNESSKAAERTSFRLARRLKFRRKLRKCETLKVLIKNKMCPLTMEELEKWRKQKIYPVSQDFLNWYRTDELKNWEPYFLRKKCAEQKAGPYEIGRALYHLAQRRGFLSNRKESTKASDGKVSKSIDELSSLMDGRTLGQYFYELKQSGEKVRGKYTSRKEHYEKEFNKICEVQEISPELKDDLYRAIFFQRKLKSQKFLVGKCTFERNKPRAPISHFEFEEFRMLSFINSIKIAKKLRRR

SEQ ID NO: 820 - protein, 675 aa, uncultured bacterium
MTAENYSNVRFAFDIGTNSIGWAVFQLNDKQEATSILNAGARIFSDGRDPKTFEPLAVRRRNVRSASRMRDRYLRRRKRTLDKLIGYGLLPEDKAERDKILLETNDKPSGSTDKKTDPYSLRARALEEKLPLAYVARALFHIGQRRGFKSNRKADRKSNEKGKIAAGIEELSGLMHQSHAPTLGAYLAKRREEGHVVRLRASSEALTNKAYAFYPERAMLEDEFHKIWQAQAEYYPDVLTKEREEELFHVMFFQRPLKEQKVGLCTLVEGELRLPKSDPLFQQFRLYKEINELAIILPDLSQRKLTMEERDTLITLMRPAKTKTFAALRKALKIPAGGRFNKETENRKQLTGDEVYSVFSKPELFGGDWAKFSIEQQREIIDQLNNEENPDKLEEWLKNKFPKLSDEQRSEIINANLPDGYGRFGITATSKILEQLKKDVISEAEAAHRCGFDHSLANRNWKGLDELPRYQEVLERHIVPGTGDKNDIYDIYKGRLTNPTVHIGLNQVRRLTNRLIKAYGKPWQIVVELARDLPMSSEERKEHNKTLNDNIKAGFERTQKLERLGQKDNANNRLLLKLWEELGKDPDDRKSIYSGTRITEPMLFSGEVEIDHILPFSLTYDDSYANKILCLREENRIKRNRAPADVTEWKDRYDEIIGRSKNCQRTNKNVLGPMQ

SEQ ID NO: 821 - protein, 1017 aa, uncultured bacterium]
MRVDSLGRCLSDEEWARVIYHLCKHRGFHWISRAEAKQTEGDSKSEGGKVKQGLAGTAKLMDEKGYRSAAEMVLAEFPEAQRNKQGEYRKALSRELLAKELALLFARQRVFGNRHATDTLETAILGNSDKKSGLFWQQKPALAGADLLKMLGTCTFEKNEYRAPKASFTAERHVWLTRLNNLRIVTDGITRQLTEQERQLVLPLPYRQAGDLTYKQLGMALTKAGLLEAGCFKFIGLAYPTEAQKAEGKTKDPESATLVKIPAWQELRQTLNKASLNDEWEKLSGDALCGQPEIFDKIAWILSVYKDDDEVRTELAKLVLPNPEGLTEALLNIRFDKFHALSLKALRAIVPHMEKGLRYDEACVQAGYHHSQLHKIGEGEHKYLPPLYDGRDGDGRMIFAEDADIPRNPVVLRSLNQARKVVNAIIRRYGSPSAVHIEMARDLSRPFDERNKIKKDQDEYQARNQRDREQFIELFGHPPKGLEFEKWRLYREQNGQCAYSQKPLASSGDVAEIFLDGSTEIDHALPYSRSFDDSKNNKVLVLTRENRDKGNRTPYEYLGGAENSERWQRFFSFVESNKAYRLAKRTRLLRKDFGAKESEEFRERNLNDTRYVCRFFKNYVEQHLKLAEGSEAKRCVVVSGQLTNFLRTRWGLLKIRSDSDRHHALDAAVVAACSHSMVQRLSNYSRTRELEQVRDGFVNIETGEIVNPAMHQQLREHFPDPWPYFRHELEARLKIDSPALLREEMARLSSYTEEELAALKPLFVSRAPQRRNGGAAHKDTIYGQPEKLKKNGSVSQKVALASLALKDIDLLADPHRNAKLYGAIRERLEAHGGKGDKAFPATNPLRKPDKEGNPTGPIVRTVTKVIDKLSGIPVRGGIAKNDTMLRVDVFTKAGRFHLVPVYVHHRVTGLPNQAITRGKDENQWAIIDDTFEWRFSLYPNDLVQIRLKDETHLGYYASTDRSTSSISIWAHDRNQSVGKDGLIRSIGVTTAKDIEKFHVDTLGNVYPAPPEKRRGLA

SEQ ID NO: 822 - protein, 600 aa, uncultured bacterium]
VNAIIKKHGSLSAVHIEMARDLSRPLDERREVKKLQEEFKDRNDKARESFEADHGYRPKGIVFEKWMLYREQHGKCAYSMEGLDIDRVLNDANYAQIDHALPYSRSYDDSKNNKVLVLTRENQNKGNRTAYEYLTSFAGGEDGDRWRNYAAWVNSNKSYRMAKRNRLLRKNYGPDEASGFKDRNLNDTRYICKFFKNYVEEHLQLAPRADGNANKRCVVVNGQLTAFLRARWGLSKVRSESDRHHALDAAVVAACSHGMVKALADYARNKEVAYLREGFPDPETGEIINPEAHARGVHHFPEPWAHFRHELQVRLYSDDLQALREDLQRLGTYSEQDLLGVRTLFVSRAPQRRNDGAVHKETIYAQPEALRKQGGVVQKVPLTSLSLKDLDNLADPHRNAKLYTALRARLEAHGGKADKAFGPDQPFYKPDKNGNPTGPIVRTIKLVIDKLSGIPIRGGVAKNDTMLRVDVFTKAGKFHLVPVYVHHRVTGLPDRAIVAFKDEVEWTQVDDSFKFLFSIHPNDLIRIGLKAKEPMIGYFASCHRGTGAFNVWSHDRNTSVGKSGSVEGIGIKTALSLEKLNIDVLGNVYPARPEQRHGLA

SEQ ID NO: 823 - protein, 1011 aa, uncultured delta
MSSKAIDSLEQLDLFKPQEYTLGLDLGIKSIGWAILSGERIANAGVYLFETAEELNSTGNKLISKAAERGRKRRIRRMLDRKARRGRHIRYLLEREGLPTDELEEVVVHQSNRTLWDVRAEAVERKLTKQELAAVLFHLVRHRGYFPNTKKLPPDDESDSADEEQGKINRATSRLREELKASDCKTIGQFLAQNRDRQRNREGDYSNLMARKLVFEEALQILAFQRKQGHELSKDFEKTYLDVLMGQRSGRSPKLGNCSLIPSELRAPSSAPSTEWFKFLQNLGNLQISNAYREEWSIDAPRRAQIIDACSQRSTSSYWQIRRDFQIPDEYRFNLVNYERRDPDVDLQEYLQQQERKTLANFRNWKQLEKIIGTGHPIQTLDEAARLITLIKDDEKLSDQLADLLPEASDKAITQLCELDFTTAAKISLEAMYRILPHMNQGMGFFDACQQESLPEIGVPPAGDRVPPFDEMYNPVVNRVLSQSRKLINAVIDEYGMPAKIRVELARDLGKGRELRERIKLDQLDKSKQNDQRAEDFRAEFQQAPRGDQSLRYRLWKEQNCTCPYSGRMIPVNSVLSEDTQIDHILPISQSFDNSLSNKVLCFTEENAQKSNRTPFEYLDAADFQRLEAISGNWPEAKRNKLLHKSFGKVAEEWKSRALNDTRYLTSALADHLRHHLPDSKIQTVNGRITGYLRKQWGLEKDRDKHTHHAVDAIVVACTTPAIVQQVTLYHQDIRRYKKLGEKRPTPWPETFRQDVLDVEEEIFITRQPKKVSGGIQTKDTLRKHRSKPDRQRVALTKVKLADLERLVEKDASNRNLYEHLKQCLEESGDQPTKAFKAPFYMPSGPEAKQRPILSKVTLLREKPEPPKQLTELSGGRRYDSMAQGRLDIYRYKPGGKRKDEYRVVLQRMIDLMRGEENVHVFQKGVPYDQGPEIEQNYTFLFSLYFDDLVEFQRSADSEVIRGYYRTFNIANGQLKISTYLEGRQDFDFFGANRLAHFAKVQVNLLGKVIK

SEQ ID NO: 824 - protein, 1011 aa, uncultured delta proteobacterium HF0070_07E19; identical to SEQ ID NO: 823

SEQ ID NO: 825 - protein, 1120 aa, Veillonella sp.
MGFKANLVNLFTDEDIEVILPEEKEFKSINLHEGIYEDVRDAYEDAWGDRFAIVDQCKVLHDIIVISSIIKPGQSLSEAKIESYNQHKEDLVLLKSVLKEDRKLYDDMFVVDTDKGTNYVKYTKQGVNGNTSATQEEFYKYVRKVVSVLPETEHTRRIVQKLEEGTFLPLQRISKNGVVPYQLHKEELVRILDKATVNFPFLNKVENGLTVADKIISILEFKIPYYVGPLNPTHSIENGGFAWVVRKEAGQVLPWNFEQKVDVQASAVKFIENLTNKCTYLIDQDVLPKYSLLYAEFSLLNELNNIRVNDKPLPADVKQAFIRDHFISLQDSKTATKKVVAKYLVDNNYVSQPPIITGMDQQIATKLTSHRDMTRILGEHFDHAMAEDIIRYITIFGESKDMLRQVLKNYYGDRLTTEQIKKLGKLTYTGWGRLSKKFLSDIWGMKKNDDDAEAGTIIEHMREGQENLMQLLSSSYSFIDVVQEYVTNVLGEKEKTAFEMLEDLSLSPMVKRSVWQTLRILDEIVSIRKELPKKIFVEVARTNKADKKRTQSRKALLEELYKQIKDEDVHVLQQELESKEDSALNSKKLYLYFTQMGRCMYSGRRIDIHELFTDKYDIDHIYPRSLTKDDSWHNIVLVEKQLNAEKTDRFPILSAIQSKQKGFWKLLWDRGFISEKKYDRLVRTTDLTDEELNQFINRQMVSTNQSVKAVTTLLHQLYPETEVVFSKAENVSDFRHDYDFVKVRSINHHHHAKDAYLNIVVGNVYHEKFTKNFLSFAKQKGTRRTYNLTKIFEYEIKLTEESKKVIWDPNIHMDIVKKMMKSNDVRVTQRAVPQKGGLSDETIYKKGIAKRGVYLPLKSSDERVRDVEKYGGRTSITISEYIILNIRDTSDQDRIEIFSLPLYIAGKKDIHKAIEEAYLSTCKKPASVVDIQILYRGLYIGSKVNINGFTYYMGGKTGSNVSIDSAVDVVMDITSSVYIKLLEKVAIKKIENPKTFRIENIKTSYNHKEVTVSKEQNIALYQELLKKLDTPLFSKMKGNKLEEFRTVGFDTFIALSLEEQASVLLEVLNVLTNFKTKRDITKIGMTSSRSTLGINISNTEQFSVITTSITGLYEQEIKIK

SEQ ID NO: 826 - protein, 983 aa, Verminephrobacter aporrectodeae
MRRRRDRLLKRKARMHDQLMRHGFFPADAAGRKVLERLNPYQLRAKGLHQALTPGEFARALFHINQRRGFQSNRKTDRKDNESGALKQAISELRAQIHDSGCATVGEWFWKERMQQKPEGVHRQGVRARYRETPYTTDEGRQRIDKRYDLYVDRAMIEQEFDALWAVQAALQPGLFTDAACKELRYTLLFQRKLRPVKPGRCTLLPEEERAPLALPSTQRFRILQEVNHLRLLDEALREVPLTLAQRDALVAALESQGKLGFAPMRKLLKLPGTVKFNLEDEKRTELKGNATSAILARKDLFGPAWAGFDAALQDEIVWQLVSEEGEGRLIAWLQQHTGVDEARAEAIADTSLPEGYGSLSRKALERIVPALQREVCSYDKAVQAAGFAHHSDLGFDFEHSGDEVQQVGERIIASTGEVRPLFAFKQLPYYGKALQRHVAFGSGKPEDPEEKRHGKIANPTVHIGLNQVRTVVNALIRRYGRPSEVVVELARDLKQSREQQQETQRKQAENQRRNTRIRERIAETLGISPERVRSSDIQKWILWEELSFDVVDRRCPYSGEQISTTMLLSPKVEIEHILPFSQTLDDSLNNRTVALREANRIKRNRTPWDARADFEARGWSYEGILHRAERMPLRKRYRFAPDGYQRWLGEDKDFLARALNDTRYLSRVAANYLRLVCPKPQGVRVIPGRMTAMLRAKFGLNDVLGLDGEKNRNDHRHHAVDACVIGVTDQGLMQRFARASAQAREDGLTRLVQDMPLPWPSYRDHVERAVRHIWVSHKPDHGFEGAMMEETAYGIRKDGSIKPRRKADGSAGREVVNLIRITESRQPVRHGVDSQGQPLPYKGYVGGSNYCIEITANDQGKWEGAVISTFEAYRIVRASGWGRLRHCSHGQNGRPLMMRLMIGDAVRLALDGSEKTMRVVKISANGQVFLVAPNEANVDARNRDKADPFAYVSKKAGSFQSAKARQVSISPIGELRDPGFKG

SEQ ID NO: 827 - protein, 5 aa, Artificial Sequence
  synthetic peptide sequence
GSGGS

SEQ ID NO: 828 - protein, 6 aa, Artificial Sequence
  synthetic peptide sequence
GGSGGS

SEQ ID NO: 829 - protein, 4 aa, Artificial Sequence
  synthetic peptide sequence
GGGS

SEQ ID NO: 830 - protein, 4 aa, Artificial Sequence
  synthetic peptide sequence
GGSG

SEQ ID NO: 831 - protein, 5 aa, Artificial Sequence
  synthetic peptide sequence
GGSGG

SEQ ID NO: 832 - protein, 5 aa, Artificial Sequence
  synthetic peptide sequence
GSGSG

SEQ ID NO: 833 - protein, 5 aa, Artificial Sequence
  synthetic peptide sequence
GSGGG

SEQ ID NO: 834 - protein, 5 aa, Artificial Sequence
  synthetic peptide sequence
GGGSG

SEQ ID NO: 835 - protein, 5 aa, Artificial Sequence
  synthetic peptide sequence
GSSSG

SEQ ID NO: 836 - protein, 16 aa, Artificial Sequence
  synthetic peptide sequence
RQIKIWFQNRRMKWKK

SEQ ID NO: 837 - RNA, 86 nt, Artificial Sequence
  synthetic nucleotide sequence
ggaaccauucaaaacagcauagcaaguuaaaauaaggcuaguccguuaucaacuugaaaaaguggcaccgagucggugcuuuuuuu

SEQ ID NO: 838 - RNA, 67 nt, Artificial Sequence
  synthetic nucleotide sequence
uagcaaguuaaaauaaggcuaguccguuaucaacuugaaaaaguggcaccgagucggugcuuuuuuu

SEQ ID NO: 839 - RNA, 88 nt, Streptococcus pyogenes
guuggaaccauucaaaacagcauagcaaguuaaaauaaggcuaguccguuaucaacuugaaaaaguggcaccgagucggugcuuuuuu

SEQ ID NO: 840 - RNA, 93 nt, Listeria innocua
auauuguuaguauucaaaauaacauagcaaguuaaaauaaggcuuuguccguuaucaacuuuuaauuaaguagcgcuguuucggcgcuuuuuu

SEQ ID NO: 841 - RNA, 104 nt, Streptococcus mutans
uguuggaaucauucgaaacaacacagcaaguuaaaauaaggcagugauuuuuaauccaguccguacacaacuugaaaaagugcgcaccgauucggugcuuuuuu

SEQ ID NO: 842 - RNA, 95 nt, Streptococcus thermophilus
uugugguuugaaaccauucgaaacaacacagcgaguuaaaauaaggcuuaguccguacucaacuugaaaagguggcaccgauucgguguuuuuuu

SEQ ID NO: 843 - RNA, 118 nt, Streptococcus thermophilus
uaauaauaguguaagggacgccuuacacaguuacuuaaaucuugcagaagcuacaaagauaaggcuucaugccgaaaucaacacccugucauuuuauggcaggguguuuucguuauuu

SEQ ID NO: 844 - RNA, 112 nt, Neisseria meningitidis
cauauugucgcacugcgaaaugagaaccguugcuacaauaaggccgucugaaaagaugugccgcaacgcucugccccuuaaagcuucugcuuuaaggggcaucguuuauuuc

SEQ ID NO: 845 - RNA, 110 nt, Pasteurella multocida
gcauauuguugcacugcgaaaugagagacguugcuacaauaaggcuucugaaaagaaugaccguaacgcucugccccuugugauucuuaauugcaaggggcaucguuuuu

SEQ ID NO: 846 - RNA, 115 nt, Mycoplasma mobile
uauuauguauuucgaaauacagauguacaguuaagaauacauaagaaugauacaucacuaaaaaaaggcuuuaugccguaacuacuacuuauuuucaaaauaaguaguuuuuuuu

SEQ ID NO: 847 - RNA, 26 nt, Artificial Sequence
  synthetic nucleotide sequence
uagcaaguuaaaauaaggcuaguccg

SEQ ID NO: 848 - RNA, 36 nt, Streptococcus pyogenes
uuguuggaaccauucaaaacagcauagcaaguuaaa

SEQ ID NO: 849 - RNA, 36 nt, Streptococcus mutans
guguuggaaucauucgaaacaacacagcaaguuaaa

SEQ ID NO: 850 - RNA, 36 nt, Streptococcus thermophilus
gguuugaaaccauucgaaacaacacagcgaguuaaa

SEQ ID NO: 851 - RNA, 36 nt, Streptococcus thermophilus
cuuacacaguuacuuaaaucuugcagaagcuacaaa

SEQ ID NO: 852 - RNA, 36 nt, Listeria innocua
auauuguuaguauucaaaauaacauagcaaguuaaa

SEQ ID NO: 853 - RNA, 34 nt, Listeria innocua
auuguuaguauucaaaauaacauagcaaguuaaa

SEQ ID NO: 854 - RNA, 36 nt, Treponema denticola
auuuaagauccaucuuaaauuacacaacgaguucaa

SEQ ID NO: 855 - RNA, 36 nt, Neisseria meningitidis
auugucgcacugcgaaaugagaaccguugcuacaau

SEQ ID NO: 856 - RNA, 38 nt, Neisseria meningitidis
auauugucgcacugcgaaaugagaaccguugcuacaau

SEQ ID NO: 857 - RNA, 36 nt, Streptococcus gordonii; identical to SEQ ID NO: 851

SEQ ID NO: 858 - RNA, 36 nt, Bifidobacterium bifidum
augaucaaggucauugaccugacaggcauaaauuga

SEQ ID NO: 859 - RNA, 36 nt, Lactobacillus salivarius
gguuuugaccucauugauuuaacauucugaguugaa

SEQ ID NO: 860 - RNA, 37 nt, Francisella tularensis
guuucaguuguuagauuauuugguauguacuuguguu

SEQ ID NO: 861 - RNA, 37 nt, Francisella tularensis
auuacagagcauuaauuauuugguacauuuauaauuu

SEQ ID NO: 862 - RNA, 37 nt, Legionella pneumophila
auuucaggguaucgaaauuuagaugauuucuaauuua

SEQ ID NO: 863 - RNA, 36 nt, Nitratifractor salsuginis
uguaacaggguaggguuuuuugaggggucuuaaaau

SEQ ID NO: 864 - RNA, 36 nt, Butyrivibrio fibrisolvens
aguuucuaaucacuuaauuuuuucggaccuacuaaa

SEQ ID NO: 865 - RNA, 36 nt, Streptobacillus moniliformis
gauucacauuauucaaguuuacuacagauucuguau

SEQ ID NO: 866 - RNA, 36 nt, Mycoplasma mobile
aguuaagaauacauaagaaugauacaucacuaaaaa

SEQ ID NO: 867 - RNA, 44 nt, Capnocytophaga ochracea
auugugaauugcuuucaaauugugcgacaaaaguagguauaaua

SEQ ID NO: 868 - RNA, 36 nt, Acidovorax ebreus
auugcagcaacggcucucaccccggauaaccacaau

SEQ ID NO: 869 - RNA, 36 nt, Wolinella succinogenes
auagccgcugccuacucagccauuuagcgcagcgac

SEQ ID NO: 870 - RNA, 37 nt, Wolinella succinogenes
uuuguuaaagcuggaugggauuauuauagaguguugc

SEQ ID NO: 871 - RNA, 37 nt, Wolinella succinogenes
uuucaaggcaucgaacggauuugcuauaaaguguugc

SEQ ID NO: 872 - RNA, 36 nt, Prevotella ruminicola
uuuugcacacguaagauuccuacaucuuaucacaau

SEQ ID NO: 873 - RNA, 48 nt, Fibrobacter succinogenes
auugugaauugcuuucagauuaugaaaauaauauaguuaaaauuuuug

SEQ ID NO: 874 - RNA, 36 nt, Campylobacter jejuni
auuuuauuucgauuuuaaucaacccuaaauuucaau

SEQ ID NO: 875 - RNA, 36 nt, Campylobacter jejuni
auuuuagucccuuuuuaaauuucuuaugagauuaua

SEQ ID NO: 876 - RNA, 25 nt, Campylobacter jejuni
aagaaauuuaaaaagggacuaaaau

SEQ ID NO: 877 - RNA, 36 nt, Pasteurella multocida
auuguagcaacgucucucauuucgcagugcaacaau

SEQ ID NO: 878 - RNA, 36 nt, Rhodopseudomonas palustris
gccguggcuuuccuaccgauuucccaccgcaugauu

SEQ ID NO: 879 - RNA, 36 nt, Olsenella uli
ucugaauuaccagucagaacgauacugcgagucaaa

SEQ ID NO: 880 - RNA, 36 nt, Rhodospirillum rubrum
guuccauggccccgucccacacgccaugauagagcg

SEQ ID NO: 881 - RNA, 36 nt, Rhodospirillum rubrum
aaacgggagaaccgucccacacggccaugguagagu

SEQ ID NO: 882 - RNA, 36 nt, Dinoroseobacter shibae
uuaacggcucgaccgcgaauucugaacguaaagaca

SEQ ID NO: 883 - RNA, 36 nt, Verminephrobacter eiseniae
uuagcguccagagcgcauaucccagugagauauccg

SEQ ID NO: 884 - RNA, 75 nt, Streptococcus pyogenes
aaacagcauagcaaguuaaaauaaggcuaguccguuaucaacuugaaaaaguggcaccgagucggugcuuuuuuu

SEQ ID NO: 885 - RNA, 77 nt, Listeria innocua
aaauaacauagcaaguuaaaauaaggcuuuguccguuaucaacuuuuaauuaaguagcgcuguuucggcgcuuuuuu

SEQ ID NO: 886 - RNA, 73 nt, Artificial Sequence
  synthetic nucleotide sequence
aacagcauagcaaguuaaaauaaggcuaguccguuaucaacuugaaaaaguggcaccgagucggugcuuuuuu

SEQ ID NO: 887 - RNA, 33 nt, Francisella novicida
uauaaauguaccaaauaauuaaugcucuguaau

SEQ ID NO: 888 - RNA, 74 nt, Campylobacter jejuni
aagaaauuuaaaaagggacuaaaauaaagaguuugcgggacucugcgggguuacaauccccuaaaaccgcuuuu

SEQ ID NO: 889 - RNA, 96 nt, Francisella novicida
aucuaaaauuauaaauguaccaaauaauuaaugcucuguaaucauuuaaaaguauuuugaacggaccucuguuugacacgucugaauaacuaaaaa

SEQ ID NO: 890 - RNA, 109 nt, Streptococcus thermophilus2
uguaagggacgccuuacacaguuacuuaaaucuugcagaagcuacaaagauaaggcuucaugccgaaaucaacacccugucauuuuauggcaggguguuuucguuauuu

SEQ ID NO: 891 - RNA, 110 nt, Mycoplasma mobile
uguauuucgaaauacagauguacaguuaagaauacauaagaaugauacaucacuaaaaaaaggcuuuaugccguaacuacuacuuauuuucaaaauaaguaguuuuuuuu

SEQ ID NO: 892 - RNA, 92 nt, Listeria innocua
auuguuaguauucaaaauaacauagcaaguuaaaauaaggcuuuguccguuaucaacuuuuaauuaaguagcgcuguuucggcgcuuuuuuu

SEQ ID NO: 893 - RNA, 89 nt, Streptococcus pyogenes
guuggaaccauucaaaacagcauagcaaguuaaaauaaggcuaguccguuaucaacuugaaaaaguggcaccgagucggugcuuuuuuu

SEQ ID NO: 894 - RNA, 107 nt, Streptococcus mutans
guuggaaucauucgaaacaacacagcaaguuaaaauaaggcagugauuuuuaauccaguccguacacaacuugaaaaagugcgcaccgauucggugcuuuuuuauuu

SEQ ID NO: 895 - RNA, 96 nt, Streptococcus thermophilus
uugugguuugaaaccauucgaaacaacacagcgaguuaaaauaaggcuuaguccguacucaacuugaaaagguggcaccgauucgguguuuuuuuu

SEQ ID NO: 896 - RNA, 102 nt, Neisseria meningitidis
acauauugucgcacugcgaaaugagaaccguugcuacaauaaggccgucugaaaagaugugccgcaacgcucugccccuuaaagcuucugcuuuaaggggca

SEQ ID NO: 897 - RNA, 110 nt, Pasteurella multocida; identical to SEQ ID NO: 845

SEQ ID NO: 898 - RNA, 37 nt, Francisella novicida
aacacaaguacauaccaaauaaucuaacaacugaaac

SEQ ID NO: 899 - RNA, 37 nt, Francisella novicida
aaauuauaaauguaccaaauaauuaaugcucuguaau

SEQ ID NO: 900 - RNA, 37 nt, Wolinella succinogenes; identical to SEQ ID NO: 871

SEQ ID NO: 901 - RNA, 37 nt, Wolinella succinogenes; identical to SEQ ID NO: 870

SEQ ID NO: 902 - RNA, 37 nt, gamma proteobacterium
auuucaguguauagaauguugggaugcauucugaaua

SEQ ID NO: 903 - RNA, 37 nt, gamma proteobacterium
auaacaagggaguauuugcuggaauaagcucugaaac

SEQ ID NO: 904 - RNA, 37 nt, Sutterella wadsworthensis
guuuccaagcaauagcucguggcguuaugauuucugu

SEQ ID NO: 905 - RNA, 37 nt, Sutterella wadsworthensis
ggugauuuccuauagcucauagcguuaugaucucuaa

SEQ ID NO: 906 - RNA, 37 nt, Legionella pneumophila; identical to SEQ ID NO: 862

SEQ ID NO: 907 - RNA, 36 nt, Listeria innocua; identical to SEQ ID NO: 852

SEQ ID NO: 908 - RNA, 36 nt, Streptococcus thermophilus; identical to SEQ ID NO: 850

SEQ ID NO: 909 - RNA, 36 nt, Streptococcus mutans; identical to SEQ ID NO: 849

SEQ ID NO: 910 - RNA, 36 nt, Streptococcus pyogenes; identical to SEQ ID NO: 848

SEQ ID NO: 911 - RNA, 36 nt, Fusobacterium nucleatum
auuuuuaauuuaaguaauaaaaaauggagcauauac

SEQ ID NO: 912 - RNA, 36 nt, Filifactor alocis
aguugacuaccauaugagauuacacuacacgguuca

SEQ ID NO: 913 - RNA, 36 nt, Treponema denticola; identical to SEQ ID NO: 854

SEQ ID NO: 914 - RNA, 36 nt, Solobacterium moorei
cuuauaccaguaagauaauuuacauaguaaguucaa

SEQ ID NO: 915 - RNA, 36 nt, Veillonella atypica
guuuuggagguuuacagaauuacacuacgaguucaa

SEQ ID NO: 916 - RNA, 36 nt, Finegoldia magna
guuuaauaccuauaugagauuacaucaugaguucaa

SEQ ID NO: 917 - RNA, 36 nt, Olsenella uli; identical to SEQ ID NO: 879

SEQ ID NO: 918 - RNA, 36 nt, Lactobacillus rhamnosus
caacuugaauugauugaucugacaucuacgaguuga

SEQ ID NO: 919 - RNA, 36 nt, Lactobacillus gasseri
ugauuagauuucauugaucuaacagccaucuaaaac

SEQ ID NO: 920 - RNA, 36 nt, Lactobacillus gasseri
acacuaaacuuuauugaucuaacaaccagauuuaaa

SEQ ID NO: 921 - RNA, 36 nt, Oenococcus kitaharae
ggguucuaccucauugaucugacacacagcauugaa

SEQ ID NO: 922 - RNA, 36 nt, Bifidobacterium bifidum; identical to SEQ ID NO: 858

SEQ ID NO: 923 - RNA, 36 nt, Staphylococcus pseudintermedius
guuuuacuucuuucuaaauaaacauaguuaaguuaa

SEQ ID NO: 924 - RNA, 36 nt, Eubacterium rectale
auuuuauagucacguaaauuuuucagaucuacuaaa

SEQ ID NO: 925 - RNA, 38 nt, Enterococcus faecalis
auuuuacugauaagaaauuauugagaaucuacaaaaau

SEQ ID NO: 926 - RNA, 36 nt, Streptococcus thermophilus; identical to SEQ ID NO: 851

SEQ ID NO: 927 - RNA, 36 nt, Staphylococcus lugdunensis
cuuguacuuauaccuaaaauuacagaaucuacugaa

SEQ ID NO: 928 - RNA, 36 nt, Eubacterium dolichum
aucauaaucuagcaaaaguuuauaugaucuaacaaa

SEQ ID NO: 929 - RNA, 36 nt, Mycoplasma mobile; identical to SEQ ID NO: 866

SEQ ID NO: 930 - RNA, 36 nt, Mycoplasma ovipneumoniae
auuuuacucuaguaagaaauugucgcacaaaaauaa

SEQ ID NO: 931 - RNA, 36 nt, Mycoplasma gallisepticum
auuauugcuuacacaauuauugucgugcuaaaauaa

SEQ ID NO: 932 - RNA, 36 nt, Mycoplasma canis
auuauuguuuacccaaauauuguacauccuaaauca

SEQ ID NO: 933 - RNA, 36 nt, Mycoplasma synoviae
uacuuacuuaacaaaauaauuguacgauuccaaaau

SEQ ID NO: 934 - RNA, 36 nt, Aminomonas paucivorans
gccuucccucccugccgaaggagcagauccucuccu

SEQ ID NO: 935 - RNA, 36 nt, Clostridium perfringens
uuauaguaacuaguuaaacucucgauaugcuauacc

SEQ ID NO: 936 - RNA, 36 nt, Clostridium cellulolyticum
auuauagcaacaauucaggcuccgauaugccauaau

SEQ ID NO: 937 - RNA, 36 nt, Acidovorax ebreus; identical to SEQ ID NO: 868

SEQ ID NO: 938 - RNA, 36 nt, Neisseria meningitidis; identical to SEQ ID NO: 855

SEQ ID NO: 939 - RNA, 36 nt, Pasteurella multocida
auuguugcacugcgaaaugagagacguugcuacaau

SEQ ID NO: 940 - RNA, 36 nt, phylotype Rs-D17
uuuguaacuuaucugagagaggaugguuauuauaau

SEQ ID NO: 941 - RNA, 36 nt, Wolinella succinogenes; identical to SEQ ID NO: 869

SEQ ID NO: 942 - RNA, 36 nt, Campylobacter jejuni
auaauacaaaaaucauuuuuuuaaacaaacauaaac

SEQ ID NO: 943 - RNA, 36 nt, Campylobacter jejuni
uauaaucucauaagaaauuuaaaaagggacuaaaau

SEQ ID NO: 944 - RNA, 36 nt, Helicobacter mustelae
guauuugucaauaaauauacuuuauaauggcaagau

SEQ ID NO: 945 - RNA, 36 nt, Roseburia intestinalis
uuguaauaaccuaauuaucacuugguaugauauaau

SEQ ID NO: 946 - RNA, 36 nt, Lactobacillus coryniformis
uuuuauucuauaguaaguuuucagcuaaaauagauc

SEQ ID NO: 947 - RNA, 36 nt, Rhodopseudomonas palustris; identical to SEQ ID NO: 878

SEQ ID NO: 948 - RNA, 36 nt, Cand. Puniceispirillum marinum
uaaccauaggcuccucaaucaccagaguguuauugc

SEQ ID NO: 949 - RNA, 36 nt, Verminephrobacter eiseniae; identical to SEQ ID NO: 883

SEQ ID NO: 950 - RNA, 36 nt, Ralstonia syzygii
guuaguagcaaagcgcaauucccgaucugcuggaaa

SEQ ID NO: 951 - RNA, 36 nt, Azospirillum B510
uuaacggcuggacccccgauccccaucgaauuucca

SEQ ID NO: 952 - RNA, 36 nt, Dinoroseobacter shibae; identical to SEQ ID NO: 882

SEQ ID NO: 953 - RNA, 36 nt, Rhodospirillum rubrum; identical to SEQ ID NO: 880

SEQ ID NO: 954 - RNA, 36 nt, Rhodospirillum rubrum; identical to SEQ ID NO: 881

SEQ ID NO: 955 - RNA, 36 nt, Spirochaeta Buddy
auuagagauaaucgcugguuuuuguuaagauauaac

SEQ ID NO: 956 - RNA, 36 nt, Prevotella ruminicola; identical to SEQ ID NO: 872

SEQ ID NO: 957 - RNA, 36 nt, Flavobacterium columnare
agauaaaauuauucuaaucuuuaaucuuaucacaau

SEQ ID NO: 958 - RNA, 36 nt, Parvibaculum lavamentivorans
cuugcgaaaagcgaccgccucucgauuugcuacaga

SEQ ID NO: 959 - RNA, 44 nt, Capnocytophaga ochracea; identical to SEQ ID NO: 867

SEQ ID NO: 960 - RNA, 48 nt, Fibrobacter succinogenes; identical to SEQ ID NO: 873

SEQ ID NO: 961 - RNA, 36 nt, Nitratifractor salsuginis; identical to SEQ ID NO: 863

SEQ ID NO: 962 - RNA, 36 nt, Akkermansia muciniphila
cuuauacgggaacuccacgauaaggcauuuuacaug

SEQ ID NO: 963 - RNA, 88 nt, Artificial Sequence
  synthetic nucleotide sequence
uuggaaccauucaaaacagcauagcaaguuaaaauaaggcuaguccguuaucaacuugaaaaaguggcaccgagucggugcuuuuuuu

SEQ ID NO: 964 - RNA, 77 nt, Artificial Sequence
  synthetic nucleotide sequence
caaaacagcauagcaaguuaaaauaaggcuaguccguuaucaacuugaaaaaguggcaccgagucggugcuuuuuuu

SEQ ID NO: 965 - RNA, 61 nt, Artificial Sequence
  synthetic nucleotide sequence
caaaacagcauagcaaguuaaaauaaggcuaguccguuaucaacuugaaaaaguuuuuuuu

SEQ ID NO: 966 - RNA, 44 nt, Artificial Sequence
  synthetic nucleotide sequence
caaaacagcauagcaaguuaaaauaaggcuaguccguuuuuuuu

SEQ ID NO: 967 - RNA, 72 nt, Artificial Sequence
  synthetic nucleotide sequence
caaaacagcauagcaaguuaaaauaaggcuaguccgguucacugccguauaggcagcuaagaaauuuuuuuu

SEQ ID NO: 968 - RNA, 14 nt, Artificial Sequence
  synthetic nucleotide sequence
uagcaaguuaaaau

SEQ ID NO: 969 - RNA, 102 nt, Artificial Sequence
  synthetic nucleotide sequence
  misc_feature (1)..(80): n is a, c, g, or u
nnnnnnnnnnnnnnnnnnnnnnnnnnnnnnnnnnnnnnnnnnnnnnnnnnnnnnnnnnnnnnnnnnnnnnnnnnnnnnnnguuuuagagcuaugcuguuuug

SEQ ID NO: 970 - RNA, 102 nt, Artificial Sequence
  synthetic nucleotide sequence
  misc_feature (1)..(80): n is a, c, g, or u
nnnnnnnnnnnnnnnnnnnnnnnnnnnnnnnnnnnnnnnnnnnnnnnnnnnnnnnnnnnnnnnnnnnnnnnnnnnnnnnnguuuuagagcuauguuauuuug

SEQ ID NO: 971 - RNA, 92 nt, exemplary
  misc_feature (1)..(80): n is a, c, g, or u
nnnnnnnnnnnnnnnnnnnnnnnnnnnnnnnnnnnnnnnnnnnnnnnnnnnnnnnnnnnnnnnnnnnnnnnnnnnnnnnnguuuuagagcua

SEQ ID NO: 972 - RNA, 152 nt, Artificial Sequence
  synthetic nucleotide sequence
  misc_feature (37)..(116): n is a, c, g, or u
guuuuagagcuaugcuguuuugaauggucccaaaacnnnnnnnnnnnnnnnnnnnnnnnnnnnnnnnnnnnnnnnnnnnnnnnnnnnnnnnnnnnnnnnnnnnnnnnnnnnnnnnnguuuuagagcuaugcuguuuugaauggucccaaaac

SEQ ID NO: 973 - RNA, 188 nt, Artificial Sequence
  synthetic nucleotide sequence
  misc_feature (37)..(116): n is a, c, g, or u
guuuuagagcuaugcuguuuugaauggucccaaaacnnnnnnnnnnnnnnnnnnnnnnnnnnnnnnnnnnnnnnnnnnnnnnnnnnnnnnnnnnnnnnnnnnnnnnnnnnnnnnnnguuuuagagcuaugcuguuuugaauggucccaaaacguuuuagagcuaugcuguuuugaauggucccaaaac

SEQ ID NO: 974 - RNA, 22 nt, Artificial Sequence
  synthetic nucleotide sequence
guuuuagagcuaugcuguuuug

SEQ ID NO: 975 - RNA, 36 nt, Streptococcus pyogenes
guuuuagagcuaugcuguuuugaauggucccaaaac

SEQ ID NO: 976 - RNA, 36 nt, Pasteurella multocida
guuguaguucccucucucauuucgcagugcuacaau

SEQ ID NO: 977 - RNA, 36 nt, Mycoplasma mobile
guuuugguguaguaucauucuuauguauucuuaaac

SEQ ID NO: 978 - RNA, 37 nt, Francisella novicida
guuucaguugcugaauuauuugguaaacuacuguuag

SEQ ID NO: 979 - RNA, 33 nt, Francisella novicida
guuucaguugcugaauuauuugguaaacuacug

SEQ ID NO: 980 - RNA, 36 nt, Streptococcus mutans
guuuuagagcuguguuguuucgaaugguuccaaaac

SEQ ID NO: 981 - RNA, 36 nt, Streptococcus thermophilus; identical to SEQ ID NO: 980

SEQ ID NO: 982 - RNA, 36 nt, Streptococcus thermophilus
guuuuuguacucucaagauuuaaguaacuguacaac

SEQ ID NO: 983 - RNA, 36 nt, Listeria innocua
guuuuagagcuauguuauuuugaaugcuaacaaaac

SEQ ID NO: 984 - RNA, 36 nt, Treponema denticola
guuugagaguuguguaauuuaagauggaucucaaac

SEQ ID NO: 985 - RNA, 36 nt, Neisseria meningitidis
guuguagcucccuuucucauuucgcagugcuacaau

SEQ ID NO: 986 - RNA, 36 nt, Streptococcus gordonii; identical to SEQ ID NO: 982

SEQ ID NO: 987 - RNA, 35 nt, Bifidobacterium bifidum
guuucaaugccugucagaucaaugacuuugaccac

SEQ ID NO: 988 - RNA, 36 nt, Lactobacillus salivarius
guuucagaaguauguuaaaucaauaagguuaagacc

SEQ ID NO: 989 - RNA, 37 nt, Francisella novicida
cuaacaguaguuuaccaaauaauucagcaacugaaac

SEQ ID NO: 990 - RNA, 37 nt, Francisella novicida; identical to SEQ ID NO: 989

SEQ ID NO: 991 - RNA, 37 nt, Legionella pneumophila
ccaauaaucccucaucuaaaaauccaaccacugaaac

SEQ ID NO: 992 - RNA, 36 nt, Nitratifractor salsuginis
guuuuaagaccccucaaaaccccacccuguuacaau

SEQ ID NO: 993 - RNA, 36 nt, Butyrivibrio fibrisolvens
guuuuaguacccgggaaaauuaagugauuggaaaac

SEQ ID NO: 994 - RNA, 36 nt, Streptobacillus moniliformis
gauacagauucuugguaaauuugaauaaugugaaug

SEQ ID NO: 995 - RNA, 36 nt, Mycoplasma mobile; identical to SEQ ID NO: 977

SEQ ID NO: 996 - RNA, 44 nt, Capnocytophaga ochracea
uguuaucaaucgcaaaacuacaaaauuugaaagcaauucacaac

SEQ ID NO: 997 - RNA, 36 nt, Acidovorax ebreus
aguguagcuauccggggugagagagggagcuacaac

SEQ ID NO: 998 - RNA, 36 nt, Wolinella succinogenes
auuauagcgaggaauggcugaguaggcggcuauaac

SEQ ID NO: 999 - RNA, 37 nt, Wolinella succinogenes
gcaacacuuuauagcaaauccgcuuagccugugaaac

SEQ ID NO: 1000 - RNA, 37 nt, Wolinella succinogenes; identical to SEQ ID NO: 999

SEQ ID NO: 1001 - RNA, 36 nt, Prevotella ruminicola
guugugguuugauguaggaaaggaaugauauacaac

SEQ ID NO: 1002 - RNA, 48 nt, Fibrobacter succinogenes
guuguuauugcacuaguaaaacuagaaaaucugaaagcaauucacaac

SEQ ID NO: 1003 - RNA, 36 nt, Campylobacter jejuni
auuuuaccauaaagaaauuuaaaaagggacuaaaac

SEQ ID NO: 1004 - RNA, 36 nt, Campylobacter jejuni
guuuuagucccuuuuuaaauuucuuuaugguaaaau

SEQ ID NO: 1005 - RNA, 36 nt, Pasteurella multocida
auuguagcacugcgaaaugagagagggaacuacaac

SEQ ID NO: 1006 - RNA, 36 nt, Rhodopseudomonas palustris
agccuaccacggggaaaucgguagggaagccacggc

SEQ ID NO: 1007 - RNA, 36 nt, Olsenella uli
guuuuggggcagugucguuuugacugguaaucaaac

SEQ ID NO: 1008 - RNA, 36 nt, Rhodospirillum rubrum
acucuaccauggcggugugggacggggccauggaac

SEQ ID NO: 1009 - RNA, 36 nt, Rhodospirillum rubrum; identical to SEQ ID NO: 1008

SEQ ID NO: 1010 - RNA, 36 nt, Dinoroseobacter shibae
aguuuagcuguucagaauucgggguccagccgcaac

SEQ ID NO: 1011 - RNA, 36 nt, Verminephrobacter eiseniae
auuguagcucacugggauaugcgcacuggccggaac

SEQ ID NO: 1012 - RNA, 37 nt, Francisella novicida; identical to SEQ ID NO: 978

SEQ ID NO: 1013 - RNA, 37 nt, Francisella novicida; identical to SEQ ID NO: 978

SEQ ID NO: 1014 - RNA, 37 nt, Wolinella succinogenes; identical to SEQ ID NO: 999

SEQ ID NO: 1015 - RNA, 37 nt, Wolinella succinogenes; identical to SEQ ID NO: 999

SEQ ID NO: 1016 - RNA, 37 nt, gamma proteobacterium
guuucagagcuuaucccaacaaaccaacagcugaaac

SEQ ID NO: 1017 - RNA, 37 nt, gamma proteobacterium; identical to SEQ ID NO: 1016

SEQ ID NO: 1018 - RNA, 37 nt, Sutterella wadsworthensis
gcgaagaucauaacgcuacgagcuauagcacugaaac

SEQ ID NO: 1019 - RNA, 37 nt, Sutterella wadsworthensis; identical to SEQ ID NO: 1018

SEQ ID NO: 1020 - RNA, 37 nt, Legionella pneumophila; identical to SEQ ID NO: 991

SEQ ID NO: 1021 - RNA, 36 nt, Listeria innocua; identical to SEQ ID NO: 983

SEQ ID NO: 1022 - RNA, 36 nt, Streptococcus thermophilus; identical to SEQ ID NO: 980

SEQ ID NO: 1023 - RNA, 36 nt, Streptococcus mutans; identical to SEQ ID NO: 980

SEQ ID NO: 1024 - RNA, 36 nt, Streptococcus pyogenes; identical to SEQ ID NO: 975

SEQ ID NO: 1025 - RNA, 36 nt, Fusobacterium nucleatum
guuugagaguaauguuauuuuaaauagauucaaaac

SEQ ID NO: 1026 - RNA, 36 nt, Filifactor alocis
guuugagaguaguguaauuucauaugguagucaaac

SEQ ID NO: 1027 - RNA, 36 nt, Treponema denticola; identical to SEQ ID NO: 984

SEQ ID NO: 1028 - RNA, 36 nt, Solobacterium moorei
guuugagaacuauguaaauuaugcugguagcaaaac

SEQ ID NO: 1029 - RNA, 36 nt, Veillonella atypica
guuugcgaguaguguaauucuguaaaucucuaaaac

SEQ ID NO: 1030 - RNA, 36 nt, Finegoldia magna
guuugagaaugauguaauuucauauagguauuaaac

SEQ ID NO: 1031 - RNA, 36 nt, Olsenella uli; identical to SEQ ID NO: 1007

SEQ ID NO: 1032 - RNA, 36 nt, Lactobacillus rhamnosus
gucucagguagaugucagaucaaucaguucaagagc

SEQ ID NO: 1033 - RNA, 36 nt, Lactobacillus gasseri
guuuuagaugguuguuagaucaauaagguuuagauc

SEQ ID NO: 1034 - RNA, 36 nt, Lactobacillus gasseri; identical to SEQ ID NO: 1033

SEQ ID NO: 1035 - RNA, 36 nt, Oenococcus kitaharae
gcuucagaugugugucagaucaaugagguagaaccc

SEQ ID NO: 1036 - RNA, 36 nt, Bifidobacterium bifidum
guuucagaugccugucagaucaaugacuuugaccac

SEQ ID NO: 1037 - RNA, 36 nt, Staphylococcus pseudintermedius
guuuuagcacuauguuuauuuagaaagagguaaaac

SEQ ID NO: 1038 - RNA, 36 nt, Eubacterium rectale
auuuuaguaacugaauaauuuacgugacuguaaaac

SEQ ID NO: 1039 - RNA, 36 nt, Enterococcus faecalis
guuuuuguauucucaauaauuucuuaucaguaaaac

SEQ ID NO: 1040 - RNA, 36 nt, Streptococcus thermophilus; identical to SEQ ID NO: 982

SEQ ID NO: 1041 - RNA, 36 nt, Staphylococcus lugdunensis
guuuuaguacucuguaauuuuagguauaagugauac

SEQ ID NO: 1042 - RNA, 36 nt, Eubacterium dolichum
guuuuguuaccauauggauuuuugcuagauuaagac

SEQ ID NO: 1043 - RNA, 36 nt, Mycoplasma mobile; identical to SEQ ID NO: 977

SEQ ID NO: 1044 - RNA, 36 nt, Mycoplasma ovipneumoniae
guuuuugugcuguacaauuucuuacuagaguaaaac

SEQ ID NO: 1045 - RNA, 36 nt, Mycoplasma gallisepticum
guuuuagcacuguacaauacuuguguaagcaauaac

SEQ ID NO: 1046 - RNA, 36 nt, Mycoplasma canis
guuuuaguguuguacaauauuuggguaaacaauaac

SEQ ID NO: 1047 - RNA, 36 nt, Mycoplasma synoviae
guuuugggguuguacaauuauuuuguuaaguaaaac

SEQ ID NO: 1048 - RNA, 36 nt, Aminomonas paucivorans
agcauagcauuucggagugcggcagggagcuaugac

SEQ ID NO: 1049 - RNA, 36 nt, Clostridium perfringens
auuauagcauaucgagaauuuacuaggaacuauaac

SEQ ID NO: 1050 - RNA, 36 nt, Clostridium cellulolyticum
auuauagcauaucggagccugaauuggagcuauaac

SEQ ID NO: 1051 - RNA, 36 nt, Acidovorax ebreus; identical to SEQ ID NO: 997

SEQ ID NO: 1052 - RNA, 36 nt, Neisseria meningitidis; identical to SEQ ID NO: 985

SEQ ID NO: 1053 - RNA, 36 nt, Pasteurella multocida; identical to SEQ ID NO: 976

SEQ ID NO: 1054 - RNA, 36 nt, phylotype Rs-D17
guuauaguuuccuuccucucucagaugugcuauaau

SEQ ID NO: 1055 - RNA, 36 nt, Wolinella succinogenes; identical to SEQ ID NO: 998

SEQ ID NO: 1056 - RNA, 36 nt, Campylobacter jejuni; identical to SEQ ID NO: 1004

SEQ ID NO: 1057 - RNA, 36 nt, Campylobacter jejuni; identical to SEQ ID NO: 1004

SEQ ID NO: 1058 - RNA, 36 nt, Helicobacter mustelae
auuuuagcauaaacauauuuaugaaguggcuaaaac

SEQ ID NO: 1059 - RNA, 36 nt, Roseburia intestinalis
auuauaccauaccaagugauaacagggaauuacaac

SEQ ID NO: 1060 - RNA, 36 nt, Lactobacillus coryniformis
gaucuauuuuagcugaaaacugaaggaaucaauagc

SEQ ID NO: 1061 - RNA, 36 nt, Rhodopseudomonas palustris; identical to SEQ ID NO: 1006

SEQ ID NO: 1062 - RNA, 36 nt, Cand. Puniceispirillum marinum
aguauagcacucuggugauugagagccuagagcaac

SEQ ID NO: 1063 - RNA, 36 nt, Verminephrobacter eiseniae; identical to SEQ ID NO: 1011

SEQ ID NO: 1064 - RNA, 36 nt, Ralstonia syzygii
agguuagcagaucgggaauugcgcucuggcuacaac

SEQ ID NO: 1065 - RNA, 36 nt, Azospirillum B510
aguguagccgauggggaucggggguccagccgcaac

SEQ ID NO: 1066 - RNA, 36 nt, Dinoroseobacter shibae; identical to SEQ ID NO: 1010

SEQ ID NO: 1067 - RNA, 36 nt, Rhodospirillum rubrum; identical to SEQ ID NO: 1008

SEQ ID NO: 1068 - RNA, 36 nt, Rhodospirillum rubrum; identical to SEQ ID NO: 1008

SEQ ID NO: 1069 - RNA, 36 nt, Spirochaeta Buddy
ggucaaucuuaacaaaaaucagcggucauccccaac

SEQ ID NO: 1070 - RNA, 36 nt, Prevotella ruminicola; identical to SEQ ID NO: 1001

SEQ ID NO: 1071 - RNA, 36 nt, Flavobacterium columnare
guugugguuugauuaaagauuagaaaacacgauauu

SEQ ID NO: 1072 - RNA, 36 nt, Parvibaculum lavamentivorans
agaguagcaaaucgagagacggccgcaauccgcagc

SEQ ID NO: 1073 - RNA, 44 nt, Capnocytophaga ochracea; identical to SEQ ID NO: 996

SEQ ID NO: 1074 - RNA, 48 nt, Fibrobacter succinogenes; identical to SEQ ID NO: 1002

SEQ ID NO: 1075 - RNA, 36 nt, Nitratifractor salsuginis; identical to SEQ ID NO: 992

SEQ ID NO: 1076 - RNA, 36 nt, Akkermansia muciniphila
guuguacugugccuuauuuuggauucaaggcaaaac

SEQ ID NO: 1077 - RNA, 44 nt, Artificial Sequence
  synthetic nucleotide sequence
guuuuagagcuagaaauagcaaguuaaaauaaggcuaguccguu

SEQ ID NO: 1078 - RNA, 60 nt, Artificial Sequence
  synthetic nucleotide sequence
  misc_feature (13)..(17): n is a, c, g, or u
guuuuagagcuannnnnuagcaaguuaaaauaaguuaaaauaaggcuaguccguuaucaa

SEQ ID NO: 1079 - RNA, 68 nt, Artificial Sequence
  synthetic nucleotide sequence
guuuuagagcuaugcugaaaagcauagcaaguuaaaaauaaguuaaaauaaggcuaguccguuaucaa

SEQ ID NO: 1080 - RNA, 69 nt, Artificial Sequence
  synthetic nucleotide sequence
guuuuagagcuaugcuguuuuggaaacaaaacagcauagcaaguuaaaauaaggcuaguccguuaucaa

SEQ ID NO: 1081 - RNA, 70 nt, Artificial Sequence
  synthetic nucleotide sequence
guuuuagagcuaguuuuagagcuagaaauagcaaguuaaaauuagcaaguuaaaauaaggcuaguccguu

SEQ ID NO: 1082 - RNA, 70 nt, Artificial Sequence
  synthetic nucleotide sequence
guuuuagagcuauagcaaguuaaaaugaaaguuuuagagcuauagcaaguuaaaauaaggcuaguccguu

SEQ ID NO: 1083 - RNA, 74 nt, Artificial Sequence
  synthetic nucleotide sequence
guuuuagagcuagaaauagcaaguuaaaauguuuuagagcuagaaauagcaaguuaaaauaaggcuaguccguu

SEQ ID NO: 1084 - RNA, 119 nt, Artificial Sequence
  synthetic nucleotide sequence
guuuuagagcuaugcuguuuuggaaacaaaacagcauagcaaguuaaaauguuuuagagcuaugcuguuuuggaaacaaaacagcauagcaaguuaaaauaaggcuaguccguuaucaa

SEQ ID NO: 1085 - RNA, 12 nt, Artificial Sequence
  synthetic nucleotide sequence
guuuuagagcua

SEQ ID NO: 1086 - protein, 11 aa, Artificial Sequence
  synthetic nucleotide sequence
YGRKKRRQRRR

SEQ ID NO: 1087 - protein, 12 aa, Artificial Sequence
  synthetic peptide sequence
RRQRRTSKLMKR

SEQ ID NO: 1088 - protein, 27 aa, Artificial Sequence
  synthetic peptide sequence
GWTLNSAGYLLGKINLKALAALAKKIL

SEQ ID NO: 1089 - protein, 33 aa, Artificial Sequence
  synthetic peptide sequence
KALAWEAKLAKALAKALAKHLAKALAKALKCEA

SEQ ID NO: 1090 - protein, 16 aa, Artificial Sequence
  synthetic peptide sequence
RQIKIWFQNRRMKWKK

SEQ ID NO: 1091 - protein, 11 aa, Artificial Sequence
  synthetic peptide sequence
YGRKKRRQRRR

SEQ ID NO: 1092 - protein, 9 aa, Artificial Sequence
  synthetic peptide sequence
RKKRRQRRR

SEQ ID NO: 1093 - protein, 11 aa, Artificial Sequence
  synthetic peptide sequence
YGRKKRRQRRR

SEQ ID NO: 1094 - protein, 8 aa, Artificial Sequence
  synthetic peptide sequence
RKKRRQRR

SEQ ID NO: 1095 - protein, 11 aa, Artificial Sequence
  synthetic peptide sequence
YARAAARQARA

SEQ ID NO: 1096 - protein, 11 aa, Artificial Sequence
  synthetic peptide sequence
THRLPRRRRRR

SEQ ID NO: 1097 - protein, 11 aa, Artificial Sequence
  synthetic peptide sequence
GGRRARRRRRR

SEQ ID NO: 1098 - DNA, 30 bp, Mus musculus Sequence
agttctttgaaagagcaataaaatggcttc

SEQ ID NO: 1099 - DNA, 30 bp, Artificial sequence Sequence
  synthetic nucleotide sequence
agttctttaaaggagcagcagaatggcttc

SEQ ID NO: 1100 - DNA, 32 bp, Artificial sequence Sequence
  synthetic nucleotide sequence
gagaaacttctgtgatgtgaggacatataaag

SEQ ID NO: 1101 - DNA, 32 bp, Artificial sequence
  synthetic nucleotide sequence
caatatctttgaaggactctgggtaaaatatc

SEQ ID NO: 1102 - DNA, 34 bp, Artificial sequence
  synthetic nucleotide sequence
ttaattctcttgtgcccttagcccactacttcag

SEQ ID NO: 1103 - DNA, 33 bp, Artificial sequence
  synthetic nucleotide sequence
ggacaggatgacaataccaggcaggataaggcc

SEQ ID NO: 1104 - DNA, 25 bp, Artificial sequence
  synthetic nucleotide sequence
gcgtgttagtgtaaatgaacttcta

SEQ ID NO: 1105 - DNA, 19 bp, Artificial sequence
  synthetic nucleotide sequence
ccaccaactgggaggaaag

SEQ ID NO: 1106 - DNA, 28 bp, Artificial sequence
  synthetic nucleotide sequence
gagaagcatgacggacaagtacaggctg

SEQ ID NO: 1107 - DNA, 28 bp, Artificial sequence
  synthetic nucleotide sequence
ttgactgtgtagatgacatggactgcct

SEQ ID NO: 1108 - DNA, 23 bp, Artificial sequence
  synthetic nucleotide sequence
tgtccggcgagggcgagggcgat

SEQ ID NO: 1109 - DNA, 23 bp, Artificial sequence
  synthetic nucleotide sequence
cgtccttgaagaagatggtgcgc

SEQ ID NO: 1110 - DNA, 27 bp, Artificial sequence
  synthetic nucleotide sequence
  misc_feature (1)..(1): first nucleotide is thiol modified
gcgctcctggacgtagccttcgggcat

SEQ ID NO: 1111 - DNA, 30 bp, Artificial sequence
  synthetic nucleotide sequence
  misc_feature (1)..(1): first nucleotide is thiol modified
aaattctgacagatatttctggcatatttc

SEQ ID NO: 1112 - DNA, 20 bp, Artificial sequence
  synthetic nucleotide sequence
  misc_feature (1)..(1): first nucleotide is thiol modified
aatagatgacatggactgcc

SEQ ID NO: 1113 - DNA, 180 bp, Mus musculus
tgatatgaatgaaactcatcaaatatgcgtgttagtgtaaatgaacttctatttaattttgaggctctgcaaagttctttaaaggagcagcagaatggcttcaactatctgagtgacactgtgaaggagatggccaagaaagcaccttcagaaatatgccagaaatatctgtcagaattt

SEQ ID NO: 1114 - DNA, 180 bp, Mus musculus
cctggtcatgggttaccagaagaaactgagaagcatgacggacaagtacaggctgcacctgtcagtggccgacctcctaagcttggatccctttgtcatcacgcttcccttctgggcagttgatgccgtggcaaactggtactttgggaacttcctatgcaaggcagtccatgtcatcta

SEQ ID NO: 1115 - DNA, 183 bp, Artificial sequence
  synthetic nucleotide sequence
gatgccacctacggcaagctgaccctgaagttcatctgcaccaccggcaagctgcccgtgccctggcccaccctcgtgaccaccgtgacgtacggcgtgcagtgcttcagtcgctaccccgaccacatgaagcagcacgacttcttcaagtccgccatgcccgaaggctacgtccaggagcgc

SEQ ID NO: 1116 - DNA, 77 bp, Artificial sequence
  synthetic nucleotide sequence
gatcctaatacgactcactatagaagcgtgatgacaaagagggttttagagctagaaatagcaagttaaaataaggc

SEQ ID NO: 1117 - DNA, 79 bp, Artificial sequence
  synthetic nucleotide sequence
gatcctaatacgactcactataggtctttgaaagagcaataaaagttttagagctagaaatagcaagttaaaataaggc

SEQ ID NO: 1118 - DNA, 77 bp, Artificial sequence
  synthetic nucleotide sequence
gatcctaatacgactcactatagctgaagcactgcacgccatgttttagagctagaaatagcaagttaaaataaggc

SEQ ID NO: 1119 - DNA, 77 bp, Artificial sequence
  synthetic nucleotide sequence
gatcctaatacgactcactatagtacaggctgcacctgtcaggttttagagctagaaatagcaagttaaaataaggc

SEQ ID NO: 1120 - DNA, 78 bp, Artificial sequence
  synthetic nucleotide sequence
gatcctaatacgactcactatagtctttgaaagagcaacaaaagttttagagctagaaatagcaagttaaaataaggc

SEQ ID NO: 1121 - DNA, 79 bp, Artificial sequence
  synthetic nucleotide sequence
ggatcctaatacgactcactatagaaagaattgatttgataccggttttagagctagaaatagcaagttaaaataaggc

SEQ ID NO: 1122 - DNA, 79 bp, Artificial sequence
  synthetic nucleotide sequence
ggatcctaatacgactcactataggtatgctatacgaagttattgttttagagctagaaatagcaagttaaaataaggc

SEQ ID NO: 1123 - protein, 1293 aa, Francisella tularensis subsp. novicida U112
MSIYQEFVNKYSLSKTLRFELIPQGKTLENIKARGLILDDEKRAKDYKKAKQIIDKYHQFIEEILSSVCISEDLLQNYSDVYFKLKKSDDDNLQKDFKSAKDTIKKQISEYIKDSEKFKNLFNQNLIDAKKGQESDLILWLKQSKDNGIELFKANSDITDIDEALEIIKSFKGWTTYFKFHENRKNVYSSNDIPTSIIYRIVDDNLPKFLENKAKYESLKDKAPEAINYEQIKKDLAEELTFDIDYKTSEVNQRVFSLDEVFEIANFNNYLNQSGITKFNTIIGGKFVNGENTKRKGINEYINLYSQQINDKTLKKYKMSVLFKQILSDTESKSFVIDKLEDDSDVVTTMQSFYEQIAAFKTVEEKSIKETLSLLFDDLKAQKLDLSKIYFKNDKSLTDLSQQVFDDYSVIGTAVLEYITQQIAPKNLDNPSKKEQELIAKKTEKAKYLSLETIKLALEEFNKHRDIDKQCRFEEILANFAAIPMIFDEIAQNKDNLAQISIKYQNQGKKDLLQASAEDDVKAIKDLLDQTNNLLHKLIFHISQSEDKANILDKDEHFYLVFEECYFELANIVPLYNKIRNYITQKPYSDEKFKLNFENSTLANGWDKNKEPDNTAILFIKDDKYYLGVMNKKNNKIFDDKAIKENKGEGYKKIVYKLLPGANKMLPKVFFSAKSIKFYNPSEDILRIRNHSTHTKNGSPQKGYEKFEFNIEDCRKFDFYKQSISKHPEWKDFGFRFSDTQRYNSIDEFYREVENQGYKLTFENISESYIDSVVNQGKLYLFQIYNKDFSAYSKGRPNLHTLYWKALFDERNLQDVVYKLNGEAELFYRKQSIPKKITHPAKEAIANKNKDNPKKESVFEYDLIKDKRFTEDKFFFHCPITINFKSSGANKFNDEINLLLKEKANDVHILSIDRGERHLAYYTLVDGKGNIIKQDTFNIIGNDRMKTNYHDKLAAIEKDRDSARKDWKKINNIKEMKEGYLSQVVHEIAKLVIEYNAIVVFEDLNFGFKRGRFKVEKQVYQKLEKMLIEKLNYLVFKDNEFDKTGGVLRAYQLTAPFETFKKMGKQTGIIYYVPAGFTSKICPVTGFVNQLYPKYESVSKSQEFFSKFDKICYNLDKGYFEFSFDYKNFGDKAAKGWTIASFGSRLINFRNSDKNHNWDTREVYPTKELEKLLKDYSIEYGHGECIKAAICGESDKFFAKLTSVLNTILQMRNSKTGTELDYLISPVADVNGNFFDSRQAPKNMPQDADANGAYHIGLKGLMLLGRIKNNQEGKKLNLVIKNEEYFEFVQNRN

SEQ ID NO: 1124 - DNA, 20 bp, Artificial sequence
  synthetic nucleotide sequence
aaaggagcagcagaatggct

SEQ ID NO: 1125 - DNA, 25 bp, Mus musculus
tatgccacttcttcaaagagatgat

SEQ ID NO: 1126 - DNA, 25 bp, Mus musculus
aacaagcaaacaattcaaaggatag

SEQ ID NO: 1127 - DNA, 23 bp, Mus musculus
aagaagatatggcattgctggta

SEQ ID NO: 1128 - DNA, 21 bp, Mus musculus
tctggaaacaaaaaggcaatg

SEQ ID NO: 1129 - DNA, 25 bp, Mus musculus
ctatgagtttaccaccctaatgtgc

SEQ ID NO: 1130 - DNA, 24 bp, Mus musculus
cttatgcttgttcaggcaaatacc

SEQ ID NO: 1131 - DNA, 25 bp, Mus musculus
tttcttggagctgtagtgtgtactg

SEQ ID NO: 1132 - DNA, 25 bp, Mus musculus
ggaatagagtgagcattgttctgat

SEQ ID NO: 1133 - DNA, 25 bp, Mus musculus
ttaagcggaaagataagctgaagta

SEQ ID NO: 1134 - DNA, 25 bp, Mus musculus
ggaccaatgttactggaacacatac

SEQ ID NO: 1135 - DNA, 25 bp, Mus musculus
catgaagatacagaaacatcccagt

SEQ ID NO: 1136 - DNA, 19 bp, Mus musculus
ggagtggcaccctccttac

SEQ ID NO: 1137 - DNA, 17 bp, Artificial sequence
  synthetic nucleotide sequence
accaccgtgacgtacgg

SEQ ID NO: 1138 - DNA, 18 bp, Artificial sequence
  synthetic nucleotide sequence
accaccctgacccatggc

SEQ ID NO: 1139 - RNA, 19 nt, Francisella novicida
aauuucuacuguuguagau

What is claimed is:

1. A complex comprising:
a) a nanoparticle-nucleic acid conjugate;
b) a Type II or a Type V CRISPR system comprising:
i) a Cas9 polypeptide or a Cpf1 polypeptide; and
ii) a guide RNA; and
c) an endosomal disruptive polymer.

2. The complex of claim 1, wherein the nanoparticle comprises a biocompatible polymer.

3. The complex of claim 2, wherein the nanoparticle is selected from a gold nanoparticle, a silver nanoparticle, a platinum nanoparticle, an aluminum nanoparticle, a palladium nanoparticle, a copper nanoparticle, a cobalt nanoparticle, an indium nanoparticle, and a nickel nanoparticle.

4. The complex of any one of claims 1 to 3, wherein the endosomal disruptive polymer is a cationic polymer selected from the group consisting of polyethylene imine, poly(arginine), poly(lysine), poly(histidine), poly-[2-{(2-aminoethyl)amino}-ethyl-aspartamide] (pAsp(DET)), a block co-polymer of poly(ethylene glycol) (PEG) and poly(arginine), a block co-polymer of PEG and poly(lysine), and a block co-polymer of PEG and poly{N—[N-(2-aminoethyl)-2-aminoethyl]aspartamide} (PEG-pAsp(DET)).

5. The complex of any one of claims 1 to 4, wherein the endosomal disruptive polymer is poly{N—[N-(2-aminoethyl)-2-aminoethyl]aspartamide} (PAsp(DET).

6. The complex of any one of claims 1 to 5, wherein the nanoparticle has a diameter in the range of 5 nm to 100 μm.

7. The complex of any one of claims 1 to 5, wherein the nanoparticle has a diameter in the range of 10 nm to 150 nm.

8. The complex of any one of claims 1 to 7, wherein the nucleic acid conjugated to the nanoparticle comprises a nucleotide sequence having at least 80% nucleotide sequence identity to a contiguous stretch of 10 to 20 nucleotides present in a target nucleic acid, or present in the guide RNA.

9. The complex of any one of claims 1 to 8, wherein the complex further comprises a donor polynucleotide.

10. The complex of any one of claims 1 to 9, wherein the complex further comprises a silicate.

11. The complex of any one of claims 1 to 10, wherein the complex comprises a Cas9 polypeptide, and wherein the Cas9 polypeptide comprises an amino acid sequence having at least 75% amino acid sequence identity to an amino acid sequence set forth in FIG. 6A-6J.

12. The complex of claim 11, wherein the Cas9 polypeptide is enzymatically active.

13. The complex of claim 11, wherein the Cas9 polypeptide exhibits reduced enzymatic activity relative to a wild-type Cas9 polypeptide, and wherein the Cas9 polypeptide retains target nucleic acid binding activity.

14. The complex of any one of claims 11 to 13, wherein the Cas9 polypeptide comprises a nuclear localization signal.

15. The complex of any one of claims 1 to 10, wherein the complex comprises a Cpf1 polypeptide, and wherein the Cpf1 polypeptide comprises an amino acid sequence having at least 75% amino acid sequence identity to the amino acid sequence set forth in FIG. 9.

16. The complex of claim 15, wherein the Cpf1 polypeptide is enzymatically active.

17. The complex of claim 15, wherein the Cpf1 polypeptide exhibits reduced enzymatic activity relative to a wild-type Cpf1 polypeptide, and wherein the Cpf1 polypeptide retains target nucleic acid binding activity.

18. The complex of any one of claims 15 to 17, wherein the Cpf1 polypeptide comprises a nuclear localization signal.

19. The complex of any one of claims 1-18, wherein the guide RNA is a single-molecule guide RNA.

20. The complex of any one of claims 1-18, wherein the guide RNA is a dual-molecule guide RNA.

21. The complex of claim 9, wherein the donor polynucleotide comprises two sequences that hybridize to the sequence targeted by the guide RNA.

22. A method of producing the complex of any of claims 1 to 21, the method comprising:
a) contacting a Type II or a Type V CRISPR system with a nanoparticle (NP)-nucleic acid conjugate, wherein the Type II CRISPR system comprises a ribonucleoprotein (RNP) comprising a Cas9 polypeptide and a guide RNA (gRNA), wherein the Type V CRISPR system comprises an RNP comprising a Cpf1 polypeptide and a gRNA, wherein said contacting is carried out under conditions sufficient to generate a NP-nucleic acid-RNP complex, thereby forming a NP-nucleic acid-RNP complex; and
b) encapsulating the NP-nucleic acid-RNP complex within one or more layers of an endosomal disruptive polymer.

23. The method of claim 22, wherein the RNP further comprises a donor polynucleotide.

24. The method of claim 22, wherein nanoparticle is a colloidal metal nanoparticle.

25. The method of claim 24, wherein the nanoparticle is a gold nanoparticle.

25. The method of claim 22, wherein nanoparticle comprises a biocompatible polymer.

26. A method of binding a target nucleic acid, comprising:
contacting a eukaryotic cell comprising a target nucleic acid with the complex of any one of claims 1-21, wherein the complex enters the cell, and wherein the guide RNA and the site-directed DNA-modifying polypeptide are released from the complex in an endosome in the cell.

27. The method of claim 26, wherein the cell is in vitro.

28. The method of claim 26, wherein the cell is in vivo.

29. The method of claim 26, wherein the Cas9 fusion polypeptide modulates transcription from the target nucleic acid.

30. The method of any of claims 26-29, wherein the Cas9 fusion polypeptide modifies the target nucleic acid.

31. The method according to claim 26, wherein the Cas9 fusion polypeptide cleaves the target nucleic acid.

32. The method of claim 26, wherein the complex comprises a donor template polynucleotide, and wherein the method comprises contacting the target nucleic acid with the donor template polynucleotide.

33. A method of genetically modifying a eukaryotic target cell, comprising contacting the eukaryotic target cell with the complex of any one of claims 1-21.

34. The method of claim 33, wherein the target cell is an in vivo target cell.

35. The method of claim 33 or claim 34, wherein the target cell is a plant cell.

36. The method of claim 33 or claim 34, wherein the target cell is an animal cell.

37. The method of claim 33 or claim 34, wherein the target cell is a mammalian cell.

38. The method of claim 36 or claim 37, wherein the target cell is a myoblast, a neuron, a chondrocyte, a lymphocyte, an epithelial cell, an adipocyte, or a keratinocyte.

39. The method of claim 33 or claim 34, wherein the target cell is pluripotent stem cell.
